(19) United States
(12) Patent Application Publication
(10) Pub. No.: US 2022/0213514 A1
(43) Pub. Date: Jul. 7, 2022

(54) GENETICALLY MODIFIED MICROORGANISM FOR PRODUCING 3-HYDROXYHEXANEDIOIC ACID, (E)-HEX-2-ENEDIOIC ACID AND/OR HEXANEDIOIC ACID, AND PRODUCTION METHOD FOR SAID CHEMICALS

(71) Applicant: TORAY INDUSTRIES, INC., Tokyo (JP)

(72) Inventors: Kyohei ISOBE, Kamakura-shi (JP); Kenji KAWAMURA, Kamakura-shi (JP); Katsushige YAMADA, Kamakura-shi (JP)

(73) Assignee: TORAY INDUSTRIES, INC., Tokyo (JP)

(21) Appl. No.: 17/609,964

(22) PCT Filed: May 8, 2020
(86) PCT No.: PCT/JP2020/018663

§ 371 Date: Nov. 9, 2021

(30) Foreign Application Priority Data
May 10, 2019 (JP) 2019-089770

(51) Int. Cl. C12P 7/42; C12P 7/44; C12N 15/70

(52) U.S. Cl. CPC C12P 7/42; C12N 15/70; C12P 7/44

(57) ABSTRACT

Disclosed is a genetically modified microorganism that produces 3-hydroxyadipic acid, α-hydromuconic acid. or adipic acid in high yield. A nucleic acid encoding any one of the polypeptides described in (a) to (c) below is introduced or the expression of the polypeptide is enhanced and the function of pyruvate kinase is impaired in the genetically modified microorganism: (a) a polypeptide composed of an amino acid sequence represented by any one of SEQ ID NOs: 1 to 7; (b) a polypeptide having the same amino acid sequence as any one of those amino acid sequences, except that one or several amino acids are substituted, deleted, inserted, andor added, and having an enzymatic activity that catalyzes a reaction to reduce 3-oxoadipyl-CoA to 3-hydroxyadipyl-CoA; (c) a polypeptide composed of an amino acid sequence with a sequence identity of not less than 70% to any one of those amino acid sequences and having an enzymatic activity that catalyzes a reaction to reduce 3-oxoadipyl-CoA to 3-hydroxyadipyl-CoA.

### TECHNICAL FIELD

[0001] The present invention relates to a genetically modified microorganism in which a nucleic acid encoding a polypeptide involved in the production of a substance of interest is introduced or the expression of the polypeptide is enhanced, and to a method of producing the substance by using the microorganism.

### BACKGROUND ART

[0002] 3-Hydroxyadipic acid (IUPAC name: 3-hydroxyhexariediiiic acid), α-hydromuconic acid (IUPAC name: (E)-hex-2-enedioic acid), and adipic acid (IUPAC name: hexanedioic acid) are dicarboxylic acids containing six carbon atoms. These dicarboxylic acids can be polymerized with a polyhydric alcohol or a polyfunctional amine, to be used as raw materials for the production of polyesters or polyamides, respectively. Additionally, these dicarboxylic acids can be used alone after ammonia addition at a terminal position in these chemicals to form lactams as raw materials for the production of polyamides.

[0003] The following documents related to the production of 3-hydroxyadipic acid or α-hydromuconic acid using a microorganism are known.

[0004] Patent Document 1 describes a method of producing 1,3-butadiene by using a microorganism in which a relevant metabolic pathway is modified, wherein 3-hydroxyadipic acid (3-hydroxyadipate) is described to be a metabolic intermediate in the metabolic pathway for biosynthesis of 1,3-butadiene from acetyl-CoA and succinyl-CoA.

[0005] Patent Document 2 describes a method of producing muconic acid by using a microorganism in which a relevant metabolic pathway is modified, wherein α-hydromuconic acid (2,3-dehydroadipate) is described to be a metabolic intermediate in the metabolic pathway for biosynthesis of trans,trans-muconic acid from acetyl-CoA and succinyl-CoA.

[0006] Patent Documents 3 and 4 describe a method of producing adipic acid and hexamethylene diamine (HMDA) by using a non-natural microorganism, wherein the biosynthetic pathways for these substances are described to share a common reaction to synthesize 3-oxoadipyi-CoA from acetyl-CoA and succinyi-CoA but diverge after the synthesis of 3-oxoadipyl-CoA. Furthermore, Patent Document 3 describes the pyruvate kinase gene as a candidate gene that is additionally deleted from the metabolic pathway to improve the HMDA formation coupled with proliferation for the IIMDA production, but a potential relationship between pyruvate kinase deficiency and increased adipic acid production is not mentioned in this document.

[0007] Additionally, all the biosynthetic pathways mentioned in Patent Documents 1 to 4 are described to share a common enzymatic reaction that reduces 3-oxoadipyl-CoA to 3-hydroxyadipyl-CoA.

[0008] Patent Documents 5 and 6 describe methods of producing 3-hydroxyadipic acid and α-hydromuconic acid by using a microorganism of the genus Serratia , respectively. The patent documents disclose that the efficiency of producing 3-hydroxyadipic acid and α-hydromuconic acid can be increased particularly by enhancing the activity of an acyl transferase that catalyzes a reaction to produce 3-oxoadipyl-CoA from acetyl-CoA and succinyl-CoA, but these documents have no description related to pyruvate kinase.

[0009] Moreover, a method of modifying a microorganism based on an in silky) analysis is disclosed in Patent Document 7, in which the production of succinic acid is increased by deleting genes encoding pyruvate kinase and a phosphotransferase system enzyme in Escherichia coli (E. coli), pykF, pykA, and ptsG, and culturing the resulting E. coli bacteria under anaerobic conditions.

### PRIOR ART DOCUMENTS

### Patent Documents

[0010] Patent Document 1: JP 2013-535203 A
[0011] Patent Document 2: US 20110124911 A1
[0012] Patent Document 3: JP 2015-146810 A
[0013] Patent Document 4: JP 2011-515111 A
[0014] Patent Document 5: WO 2017209102
[0015] Patent Document 6: WO 2017209103
[0016] Patent Document 7: JP 2008-527991 A

### SUMMARY OF THE INVENTION

### Problems to be Solved by the Invention

[0017] Patent Documents 1 and 2 describe metabolic pathways by which the microorganisms can produce 3-hydroxyadipic acid and α-hydromuconic acid, but have no description about interruption of the metabolic pathways to allow the microorganisms to secrete 3-hydroxyadipic acid or α-hydromuconic acid into culture medium. Moreover, the prior studies described in Patent Documents 1 to 4 have not examined whether or not 3-hydroxyadipic acid, α-hydromuconic acid, or adipic acid can be actually produced by using a non-natural microorganism in which a nucleic acid encoding an enzyme that catalyzes a reaction to reduce 3-oxoadipyl-CoA to 3-hydroxyadipyl-CoA has been introduced. Accordingly, it is not known whether the enzyme that catalyzes a reaction to reduce 3-oxoadipyl-CoA to 3-hydroxyadipyl-CoA, as described in Patent Documents 1 to 4, also exhibits excellent activity in the production of 3-hydroxyadipic acid, α-hydromuconic acid, andor adipic acid.

[0018] Accordingly, an object of the present invention is to provide a genetically modified microorganism for producing 3-hydroxyadipic acid, α-hydromuconic acid, andor adipic acid in high yield and a method of producing a substance by using the modified microorganism, wherein the modified microorganism is based on a genetically modified microorganism in which a nucleic acid encoding an enzyme that exhibits excellent activity in 3-oxoadipyl-CoA reduction reaction is introduced or the expression of the enzyme is enhanced, and wherein the modified microorganism is further modified to have an altered metabolic pathway.

### Means for Solving the Problem

[0019] The inventors intensively studied in order to achieve the above-described object and consequently found that 3-hydroxyadipic acid, a-hydromuconic acid, andor adipic acid can be produced in high yield by a genetically modified microorganism in which a nucleic acid encoding an enzyme that exhibits excellent activity in 3-oxoadipyl-CoA reduction reaction is introduced or the expression of the enzyme is enhanced and the function of pyruvate kinase is further impaired, to complete the present invention.

[0020] That is, the present invention provides the following:
[0021] (1) A genetically modified microorganism in which a nucleic acid encoding any one of the polypeptides described in (a) to (c) below is introduced or the expression of the polypeptide is enhanced and the function of pyruvate kinase is impaired:

[0022] (a) a polypeptide composed of an amino acid sequence represented by any one of SEQ ID NOs: 1 to 7;

[0023] (b) a polypeptide composed of the same amino acid sequence as that represented by any one of SEQ ID NOs: 1 to 7, except that one or several amino acids are substituted, deleted, inserted, andor added, and having an enzymatic activity that catalyzes a reaction to reduce 3-oxoadipyl-CoA to 3-hydroxyadipyl-CoA;

[0024] (c) a polypeptide composed of an amino acid sequence with a sequence identity of not less than 70% to the sequence represented by any one of SEQ ID NOs: 1 to 7 and having an enzymatic activity that catalyzes a reaction to reduce 3-oxoadipyl-CoA to 3-hydroxyadipyl-CoA.
[0025] (2) The genetically modified microorganism according to (1), wherein a polypeptide selected from the above (b) and (c) contains a region composed of an amino acid sequence represented by SEQ ID NO: 173.
[0026] (3) The genetically modified microorganism according to (2), wherein the amino acid sequence represented by SEQ ID NO: 173 contains a phenylalanine or leucine residue at the 13th amino acid position from the N terminus, a leucine or glutamine residue at the 15th amino acid position from the N terminus, a lysine or asparagine residue at the 16th amino acid position from the N terminus, a glycine or serine residue at the 17th amino acid position from the N terminus, a proline or arginine residue at the 19th amino acid position from the N terminus, and a leucine, methionine, or valine residue at the 21st amino acid position from the N terminus.
[0027] (4) The genetically modified microorganism according to any one of (1) to (3), which is a genetically modified microorganism belonging to a genus selected from the group consisting of Escherichia, Serratia, Hafnia, and Pseudomonas.
[0028] (5) The genetically modified microorganism according to any one of (1) to (4), which has an ability to generate 3-oxoadipyl-CoA and coenzyme A from acetyl-CoA and succinyl-CoA and an ability to generate 3-hydroxyadipic acid from 3-hydroxyadipyl-CoA.
[0029] (6) The genetically modified microorganism according to any one of (1) to (4), which has an ability to generate 3-oxoadipyl-CoA and coenzyme A from acetyl-CoA and succinyl-CoA, an ability to generate 2,3-dehydroadipyl-CoA from 3-hydroxyadipyl-CoA, and an ability to generate α-hydromuconic acid from 2,3-dehydroadipyl-CoA.
[0030] (7) The genetically modified microorganism according to any one of (1) to (4), which has an ability to generate 3-oxoadipyl-CoA and coenzyme A from acetyl-CoA and succinyl-CoA, an ability to generate 2,3-dehydroadipyl-CoA from 3-hydroxyadipyl-CoA, an ability to generate adipyl-CoA from 2,3-dehydroadipyl-CoA, and an ability to generate adipic acid from adipyl-CoA.
[0031] (8) The genetically modified microorganism according to any one of (1) to (7), wherein the function of a phosphotransferase system enzyme is further impaired.
[0032] (9) A method of producing 3-hydroxyadipic acid, comprising culturing the genetically modified microorganism according to any one of (1) to (5) and (8) in a culture medium containing a carbon source as a raw material for fermentation.
[0033] (10) A method of producing u-hydromuconic acid, comprising culturing the genetically modified microorganism according to any one of (1) to (4), (6) and (8) in a culture medium containing a carbon source as a raw material for fermentation.
[0034] (11) A method of producing adipic acid, comprising culturing the genetically modified microorganism according to any one of (1) to (4), (7) and (8) in a culture medium containing a carbon source as a raw material for fermentation.
[0035] (12) A method of producing one or more substances selected from the group consisting of 3-hydroxyadipic acid, α-hydromuconic acid, and adipic acid, comprising culturing a genetically modified microorganism in a culture medium containing a carbon source as a raw material for fermentation, wherein a nucleic acid encoding a polypeptide encoded by the 3-hydroxybutyryl-CoA dehydrogenase gene of a microorganism of the genus Serratia, which forms a gene cluster with 5-aminolevulinic acid synthase gene in the microorganism, is introduced or the expression of the polypeptide is enhanced and the function of pyruvate kinase is impaired in the genetically modified microorganism.
[0036] (13) The method according to (12), wherein the genetically modified microorganism is a microorganism in which the function of a phosphotransferase system enzyme is further impaired.

### Effects of the Invention

[0037] The genetically modified microorganism according to the present invention, which expresses an enzyme that exhibits excellent activity in a reaction to reduce 3-oxoadipyl-CoA to 3-hydroxyadipyl-CoA and, furthermore, has an impaired pyruvate kinase function, can produce 3-hydroxyadipic acid, α-hydromuconic acid, andor adipic acid in high yield compared to a parental strain of the microorganism in which pyruvate kinase is not impaired.

[0038] The method of producing a substance according to the present invention uses the genetically modified microorganism which is excellent in the production of 3-hydroxyadipic acid, α-hydromuconic acid, andor adipic acid via production of 3-hydroxyadipyl-CoA and thus can greatly increase the production of those substances.

### BRIEF DESCRIPTION OF THE DRAWING

[0039] FIG. 1 shows a gene cluster composed of a 3-hydroxybutyryl-CoA dehydrogenase gene and a 5-aminolevulinic acid synthase gene.

### DETAILED DESCRIPTION OF THE INVENTION

[0040] The microorganism according to the present invention is a genetically modified microorganism in which a nucleic acid encoding a polypeptide described in (a) to (c) below is introduced or the expression of the polypeptide is enhanced and the function of pyruvate kinase is impaired:

[0041] (a) a polypeptide composed of an amino acid sequence represented by any one of SEQ ID NOs: 1 to 7;

[0042] (b) a polypeptide composed of the same amino acid sequence as that represented by any one of SEQ ID NOs: 1 to 7, except that one or several amino acids are substituted, deleted, inserted, andor added, and having an enzymatic activity that catalyzes a reaction to reduce 3-oxoadipyl-CoA to 3-hydroxyadipyl-CoA;

[0043] (c) a polypeptide composed of an amino acid sequence with a sequence identity of not less than 70% to the sequence represented by any one of SEQ ID NOs: 1 to 7 and having activity in reduction of 3-oxoadipyl-CoA to 3-hydroxyadipyl-CoA.

[0044] An enzyme that catalyzes the reaction of reducing 3-oxoadipyl-CoA to 3-hydroxyadipyl-CoA is hereinafter referred to as “3-oxoadipyl-CoA reductase” in the specification. Additionally, 3-hydroxyadipic acid, α-hydromuconic acid, and adipic acid may be abbreviated as 3IIA, HMA, and ADA, respectively, in this specification.

[0045] In the present invention, introducing a nucleic acid means introducing a nucleic acid from the outside to the inside of a microorganism to give the microorganism an ability to produce a polypeptide encoded by the nucleic acid. The method of introduction of a nucleic acid is not limited to a particular method, and examples of the method that can be used include a method in which a nucleic acid of interest is integrated into an expression vector capable of autonomous replication in a microorganism and then integrated into a host microorganism, and a method in which a nucleic acid of interest is integrated into the genome of a microorganism.

[0046] In the present invention, enhancing the expression of a polypeptide means enhancing the expression of a polypeptide which a microorganism originally has. The method of enhancement of expression is not limited to a particular method, and examples of the method include a method in which a nucleic acid encoding a polypeptide of interest is increased in copy number, and a method in which a promoter region or a ribosome-binding sequence upstream of the region coding for a polypeptide of interest is modified. These methods may be carried out individually or in combination.

[0047] Additionally, one or more of the above nucleic acids may be introduced. Moreover, the introduction of a nucleic acid and the enhancement of polypeptide expression may be combined.

[0048] For the polypeptide used in the present invention and composed of the same amino acid sequence as that represented by any one of SEQ ID NOs: 1 to 7, except that one or several amino acids are substituted, deleted, inserted, andor added, and having 3-oxoadipyl-CoA reductase activity, the range represented by the phrase “one or several” is preferably 10 or less, more preferably 5 or less, especially preferably 4 or less, and most preferably 1 or 2 or less. In the case of amino acid substitution, the activity of the original polypeptide is more likely to be maintained when an amino acid(s) isare replaced by an amino acid(s) with similar properties (so-called conservative substitution). That is, the physiological properties of the original polypeptide are often maintained when an amino acid(s) isarc replaced by an amino acid(s) with similar properties. Therefore, in the case of substitution, a given amino acid is preferably replaced by another amino acid with similar properties. That is, the 20 amino acids that make up natural proteins can be divided into groups of amino acids with similar properties, such as neutral amino acids with a less polar side chain (Gly, Ile, Val, Leu. Ala, Met, Pro), neutral amino acids with a hydrophilic side chain (Asn, Gln, Thr, Ser, Tyr, Cys), acidic amino acids (Asp, Glu), and basic amino acids

[0049] (Arg, Lys, His), and aromatic amino acids (Phe, Tyr, Trp). It is often the case that substitution between amino acids in the same group does not change the properties of the original polypeptide.

[0050] For the polypeptide used in the present invention and having an amino acid sequence with a sequence identity of not less than 70% to the sequence represented by any one of SEQ ID NOs: 1 to 7 and having 3-oxoadipyl-CoA reductase activity, the sequence identity is preferably not less than 80%, more preferably not less than 85%, further preferably not less than 90%, still further preferably not less than 95%, yet further preferably not less than 97%, and even further preferably not less than 99%.

[0051] In the present invention, the term “sequence identity” means a ratio (percentage) of the number of identical amino acid or nucleotide residues relative to the total number of amino acid or nucleotide residues over the overlapping portion of an amino acid sequence alignment (including an amino acid corresponding to the translation start site) or a nucleotide sequence alignment (including the start codon), which is obtained by aligning two amino acid or nucleotide sequences with or without introduction of gaps for an optimal match, and is calculated by the following formula (1). In the formula (1), the length of a shorter sequence being compared is not less than 400 amino acids; in cases where the length of the shorter sequence is less than 400 amino acids, the sequence identity is not defined. The sequence identity can be easily determined using BLAST (Basic Local Alignment Search Tool), an algorithm widely used in this field. For example, BLAST is publicly available on a website, such as that of NCB1 (National Center for Biotechnology Information) or KEGG (Kyoto Encyclopedia of Genes and Genomes), on which the sequence identity can be easily determined using default parameters. Additionally, the sequence identity can also be determined using a similar function implemented in a software program such as Genetyx.

$$( 1 )$$

$$Sequence identity ( \% ) = the number of matches ( without counting the number of gaps ) \text{/} the length of a shorter sequence ( excluding the terminal gaps ) \times 100$$

[0052] By using a function of Genetyx (% Identity Matrix) to calculate sequence identities based on the formula (1) among the amino acid sequences represented by SEQ ID NOs: 1 to 7, the lowest sequence identity of 71.51% is found between the sequences represented by SEQ ID NOs: 2 and 4, and the sequence identities among the amino acid sequences represented by SEQ ID NOs: 1 to 7 are found to be at least not less than 70%. The results of calculation of sequence identity using Genetyx are presented in Table 1. In Tables 1 to 5 below, the numbers in the leftmost column represent SEQ ID NOs.

TABLE 1
[GENETYX: identity Matrix]
*Gaps are NOT taken into account.

| | 1 Serratia | 2 Serratia | 3 Serratia | 4 Serratia | 5 Serratia | 6 Serratia | 7 Serratia |
|---|---|---|---|---|---|---|---|
| [%] | | | | | | | |
| 1 Serratia marcescens ATCC13880 | * | | | | | | |
| 2 Serratia nematodiphila DSM21420 | 98.23 | * | | | | | |
| 3 Serratia plymuthica NBRC102599 | 72.10 | 71.51 | * | | | | |
| 4 Serratia proteamaculans 568 | 72.29 | 71.51 | 86.24 | * | | | |
| 5 Serratia ureilytica Lr5/4 | 90.76 | 90.76 | 72.88 | 73.28 | * | | |
| 6 Serratia sp. BW106 | 72.29 | 71.90 | 87.03 | 92.33 | 73.67 | * | |
| 7 Sierratia liquefaciens FK01 | 72.29 | 71.70 | 84.67 | 86.83 | 73.47 | 87.81 | * |
| [Match Count/Length] | | | | | | | |
| 1 Serratia marcescens ATCC13880 | * | | | | | | |
| 2 Serratia nematodiphila DSM21420 | 500/509 | * | | | | | |
| 3 Serratia plymuthica NBRC102599 | 367/509 | 364/509 | * | | | | |
| 4 Serratia proteamaculans 568 | 368/509 | 364/509 | 439/509 | * | | | |
| 5 Serratia ureilytica Lr5/4 | 462/509 | 462/509 | 371/509 | 373/509 | * | | |
| 6 Serratia sp. BW106 | 368/509 | 366/509 | 443/509 | 470/509 | 375/509 | * | |
| 7 Serratia liquefaciens FK01 | 368/509 | 365/509 | 431/509 | 442/509 | 374/509 | 447/509 | * |

[0053] When each of the amino acid sequences represented by SEQ ID NOs: 1 to 7 as queries was compared using BLASTP to all the amino acid sequences registered in the NCBI amino acid database (non-redundant protein sequences) to determine sequence identities, all sequences with a sequence identity of not less than 70% were found to be from bacteria of the genus Serrano.

[0054] All the polypeptides represented by SEQ ID NOs: 1 to 7 as described above in (a) contain a common sequence 1 composed of 24 amino acid residues and represented by SEQ ID NO: 173 within a region from the 1 5th to the 38th amino acid residues from the N terminus (hereinafter, an amino acid residue at the n-th position from the N terminus may conveniently be represented by n “a.a.”; for example, the region from the 15th to the 38th amino acid residues from the N tei tinus may be thus simply represented by “15 to 38 a.a.”). In the common sequence 1, Xaa represents an arbitrary amino acid residue, and the 13 a.a. is preferably a phenylalanine or leucine, and the 15 a.a. is preferably a leucine or glutamine, and the 16 a.a. is preferably a lysine or asparagine, and the 17 a.a. is a glycine or serine, more preferably a glycine, and the 19 a.a. is preferably a proline or arginine, and the 21 a.a. is preferably a leucine, methionine, or valine. The common sequence 1 corresponds to the region including the NADtbinding residue and the surrounding amino acid residues. In the NAD^{±}-binding residues, the 24th amino acid residue in the common sequence 1 is an aspartic acid, as described in Biochimie., 2012 Feb. 94 (2): 471-8., but in the common sequence 1, the residue is an asparagine, which is characteristic. It is thought that the presence of the common sequence 1 causes the polypeptides represented by SEQ ID NOs: 1 to 7 to show excellent enzymatic activity as 3-oxoadipyl-CoA reductases.

[0055] The polypeptides as described above in (b) and (c) also preferably contain the common sequence 1 composed of 24 amino acid residues and represented by SEQ ID NO: 173 within a region from 1 to 200 a.a. The common sequence is more preferably located within a region from 1 to 150 a.a., and further preferably within a region from 1 to 100 a.a. Specific examples of the polypeptides include those with the amino acid sequences represented by SEQ ID NOs: 8 to 86. The amino acid sequences represented by SEQ ID NOs: 8 to 86 contain the common sequence 1 composed of 24 amino acid residues and represented by SEQ ID NO: 173 within a region from 15 to 38 a.a. The amino acid sequences represented by SEQ ID NOs: 8 to 86 have a sequence identity of not less than 90% to the amino acid sequence represented by any one of SEQ ID NOs: 1 to 7. The results of calculation of sequence identity using Genetyx are presented in Tables 2-1 to 2-3 and Tables 3-1 to 3-3.

TABLE 2-1
[GENETYX: 1 Identity Matrix]
*Gaps are NOT taken into account.

| [%] | | 1 Serratia | 2 Serratia | 3 Serratia | 4 Serratia | 5 Serratia | 6 Serratia | 7 Serratia |
|---|---|---|---|---|---|---|---|---|
| 1 | Serratia marcescens ATCC13880 | * | | | | | | |
| 2 | Serratia nematodiphila DSM21420 | 98.23 | * | | | | | |
| 3 | Serratia plymuthica NBRC102599 | 72.10 | 71.51 | * | | | | |
| 4 | Serratia proteamaculans 568 | 72.29 | 71.51 | 86.24 | * | | | |
| 5 | Serratia ureilytica Lr5/4 | 90.76 | 90.76 | 72.88 | 73.28 | * | | |
| 6 | Serratia sp. BW106 | 72.29 | 71.90 | 87.03 | 92.33 | 73.67 | * | |
| 7 | Serratia liquefaciens FK01 | 72.29 | 71.70 | 84.67 | 86.83 | 73.47 | 87.81 | * |
| 8 | Serratia sp. S119 | 94.89 | 94.30 | 72.88 | 72.49 | 91.55 | 73.08 | 72.88 |
| 9 | Serratia sp. YD25 | 92.33 | 92.33 | 72.49 | 72.49 | 93.51 | 72.69 | 72.88 |
| 10 | Serratia sp. FS14 | 98.62 | 99.60 | 71.70 | 71.70 | 91.15 | 72.10 | 72.10 |
| 11 | Serratia sp. HMSC15F11 | 94.89 | 94.30 | 73.28 | 73.28 | 91.35 | 73.47 | 73.47 |
| 12 | Serratia sp. JKS000199 | 90.76 | 90.76 | 72.69 | 73.08 | 99.41 | 73.47 | 73.28 |
| 13 | Serratia sp. TEL | 90.56 | 90.56 | 72.88 | 73.28 | 99.80 | 73.67 | 73.47 |
| 14 | Serratia sp. ISTD04 | 90.56 | 90.56 | 72.49 | 73.08 | 99.41 | 73.47 | 73.28 |
| 15 | Serratia sp. SCB1 | 90.76 | 90.76 | 72.88 | 73.28 | 99.60 | 73.47 | 73.47 |
| 16 | Serratia sp. S4 | 72.10 | 71.31 | 86.44 | 98.62 | 73.08 | 91.94 | 86.64 |
| 17 | Serratia sp. C-1 | 72.49 | 71.90 | 98.03 | 86.05 | 73.28 | 86.64 | 84.08 |
| 18 | Serratia marcescens 532 | 99.80 | 98.03 | 72.29 | 72.10 | 90.56 | 72.10 | 72.10 |
| 19 | Serratia marcescens 2880STDY5683033 | 99.60 | 97.83 | 72.10 | 72.29 | 90.37 | 72.10 | 72.29 |
| 20 | Serratia marcescens WW4 | 98.42 | 99.41 | 71.90 | 71.90 | 90.96 | 72.29 | 71.90 |
| 21 | Serratia marcescens K27 | 98.23 | 99.21 | 71.31 | 71.31 | 90.96 | 71.70 | 71.70 |
| 22 | Serratia marcescens 280 | 98.42 | 99.41 | 71.70 | 71.70 | 90.96 | 72.10 | 72.10 |
| 23 | Serratia marcescens 19F | 98.42 | 99.41 | 71.51 | 71.70 | 90.96 | 72.10 | 72.10 |
| 24 | Serratia marcescens 1185 | 98.23 | 99.60 | 71.31 | 71.31 | 90.37 | 71.70 | 71.51 |

TABLE 2-2

| | | | | | | | | |
|---|---|---|---|---|---|---|---|---|
| 25 | Serratia marcescens S217 | 98.23 | 99.21 | 71.31 | 71.51 | 90.96 | 71.90 | 71.90 |
| 26 | Serratia marcescens KHCo-24B | 98.03 | 99.80 | 71.31 | 71.31 | 90.56 | 71.70 | 71.90 |
| 27 | Serratia marcescens Z6 | 98.03 | 99.01 | 71.70 | 71.90 | 90.56 | 72.29 | 71.90 |
| 28 | Serratia marcescens 546 | 97.83 | 99.21 | 71.51 | 71.70 | 90.37 | 72.10 | 71.70 |
| 29 | Serratia nematodiphila HB307 | 98.03 | 99.80 | 71.31 | 71.51 | 90.56 | 71.90 | 71.70 |
| 30 | Serratia marcescens VGH107 | 98.03 | 99.01 | 71.31 | 71.51 | 90.56 | 71.90 | 71.90 |
| 31 | Serratia marcescens MCB | 95.48 | 95.28 | 72.29 | 72.69 | 91.15 | 72.88 | 72.69 |
| 32 | Serratia marcescens AH0650 | 95.67 | 95.48 | 72.29 | 72.69 | 90.76 | 73.28 | 72.69 |
| 33 | Serratia marcescens UMH12 | 95.48 | 95.28 | 72.10 | 72.49 | 90.56 | 73.08 | 72.49 |
| 34 | Serratia sp. OMLW3 | 95.48 | 95.28 | 72.29 | 72.49 | 90.76 | 73.28 | 72.69 |
| 35 | Serratia marcescens UMH11 | 95.28 | 95.08 | 72.10 | 72.69 | 90.56 | 73.47 | 72.49 |
| 36 | Serratia marcescens UMH1 | 95.08 | 94.89 | 72.29 | 72.49 | 90.17 | 73.08 | 72.29 |
| 37 | Serratia marcescens 2880STDY5683020 | 95.48 | 94.89 | 73.08 | 72.69 | 92.14 | 73.28 | 73.08 |
| 38 | Serratia marcescens 99 | 95.48 | 94.69 | 73.28 | 72.88 | 91.55 | 73.67 | 73.28 |
| 39 | Serratia marcescens 374 | 94.89 | 94.69 | 72.29 | 72.29 | 90.17 | 73.08 | 72.29 |
| 40 | Serratia marcescens 2880STDY5683036 | 95.28 | 94.49 | 73.08 | 72.69 | 91.35 | 73.47 | 73.08 |
| 41 | Serratia marcescens 2880STDY5683034 | 95.28 | 94.69 | 73.08 | 72.69 | 91.94 | 73.28 | 73.08 |
| 42 | Serratia marcescens 2880STDY5682892 | 95.28 | 94.69 | 73.28 | 72.88 | 91.94 | 73.47 | 73.28 |
| 43 | Serratia marcescens SM39 | 95.08 | 94.49 | 73.28 | 72.69 | 92.14 | 73.28 | 73.28 |
| 44 | Serratia marcescens 189 | 95.08 | 94.49 | 73.28 | 72.88 | 92.14 | 73.47 | 73.28 |
| 45 | Serratia marcescens SMB2099 | 95.08 | 94.49 | 73.47 | 72.69 | 91.74 | 73.67 | 73.47 |
| 46 | Serratia marcescens 2880STDY5682862 | 94.89 | 94.30 | 73.47 | 72.88 | 91.55 | 73.47 | 73.47 |
| 47 | Serratia marcescens SE4145 | 94.89 | 94.30 | 73.08 | 72.49 | 91.94 | 73.08 | 73.08 |
| 48 | Serratia marcescens 2880STDY5682876 | 95.08 | 94.49 | 73.28 | 72.88 | 91.74 | 73.47 | 73.28 |
| 49 | Serratia marcescens 709 | 95.08 | 94.49 | 73.08 | 72.69 | 91.74 | 73.28 | 73.08 |
| 50 | Serratia marcescens MGH136 | 94.89 | 94.30 | 72.88 | 72.49 | 91.94 | 73.08 | 72.88 |
| 51 | Serratia marcescens 2880STDY5682884 | 94.69 | 94.10 | 72.88 | 72.49 | 91.74 | 73.08 | 73.08 |
| 52 | Serratia marcescens D-3 | 95.08 | 94.49 | 73.08 | 72.69 | 91.74 | 73.28 | 73.08 |
| 53 | Serratia marcescens 2880STDY5682957 | 94.89 | 94.30 | 72.88 | 72.69 | 91.55 | 73.28 | 72.88 |
| 54 | Serratia marcescens YDC563 | 94.69 | 94.10 | 72.88 | 72.69 | 91.35 | 73.28 | 72.88 |
| 55 | Serratia marcescens 2880STDY5683035 | 94.80 | 94.30 | 73.08 | 72.69 | 91.55 | 73.28 | 73.08 |

TABLE 2-3

| | | | | | | | | |
|---|---|---|---|---|---|---|---|---|
| 56 | Serratia marcescens 2880STDY5682930 | 94.69 | 94.10 | 72.88 | 72.49 | 91.35 | 73.08 | 72.88 |
| 57 | Serratia marcescens 790 | 94.49 | 94.30 | 73.28 | 72.88 | 91.35 | 73.47 | 73.28 |
| 58 | Serratia marcescens UMH5 | 93.51 | 92.92 | 72.69 | 72.88 | 90.37 | 72.69 | 72.49 |
| 59 | Serratia marcescens 288OSTDY5682988 | 93.32 | 92.73 | 72.69 | 72.88 | 90.17 | 72.69 | 72.49 |
| 60 | Serratia marcescens 945154301 | 94.89 | 94.30 | 73.28 | 73.28 | 91.35 | 73.67 | 73.47 |
| 61 | Serratia marcescens at10508 | 94.69 | 94.10 | 73.47 | 73.47 | 91.15 | 73.67 | 73.67 |
| 62 | Serratia marcescens ML2637 | 94.49 | 93.90 | 73.28 | 73.47 | 90.96 | 73.67 | 73.67 |
| 63 | Serratia marcescens SM1978 | 94.30 | 93.71 | 73.28 | 73.28 | 90.76 | 73.67 | 73.67 |
| 64 | Serratia marcescens PWN146 | 94.10 | 93.51 | 72.88 | 72.88 | 90.96 | 72.88 | 73.28 |
| 65 | Serratia marcescens H1q | 92.53 | 92.53 | 72.49 | 72.49 | 93.51 | 72.69 | 73.08 |
| 66 | Serratia marcescens UMH6 | 91.15 | 91.15 | 72.69 | 73.08 | 99.60 | 73.47 | 73.28 |
| 67 | Serratia nematodiphila WCU338 | 91.15 | 91.15 | 72.69 | 73.08 | 99.41 | 73.47 | 73.28 |
| 68 | Serratia sp. OLEL1 | 90.96 | 90.96 | 72.88 | 73.28 | 99.80 | 73.67 | 73.47 |
| 69 | Serratia marcescens 7209 | 90.96 | 90.96 | 72.49 | 72.88 | 99.41 | 73.28 | 73.08 |
| 70 | Serratia marcescens sicaria (Ss1) | 90.96 | 90.96 | 72.69 | 73.08 | 99.41 | 73.28 | 73.28 |
| 71 | Serratia sp. OLFL2 | 90.76 | 90.76 | 72.69 | 73.08 | 99.60 | 73.47 | 73.28 |
| 72 | Serratia marcescens BIDMC 81 | 90.76 | 90.76 | 72.88 | 73.28 | 99.60 | 73.67 | 73.47 |
| 73 | Serratia marcescens BIDMC 50 | 90.76 | 90.76 | 72.69 | 73.08 | 99.21 | 73.47 | 73.28 |
| 74 | Serratia marcescens UMH7 | 90.56 | 90.56 | 72.88 | 73.28 | 99.80 | 73.67 | 73.47 |
| 75 | Serratia marcescens RSC-14 | 90.56 | 90.56 | 72.88 | 73.47 | 99.21 | 73.87 | 73.67 |
| 76 | Serratia marcescens SIMO3 | 92.33 | 92.33 | 72.29 | 72.29 | 93.51 | 72.49 | 72.88 |
| 77 | Serratia marcescens 90-166 | 90.17 | 89.78 | 72.49 | 73.47 | 96.66 | 73.67 | 73.08 |
| 78 | Serratia marcescens UMH2 | 90.76 | 90.76 | 72.88 | 73.28 | 99.21 | 73.67 | 73.47 |
| 79 | Serratia plymuthica A30 | 72.49 | 71.90 | 96.66 | 85.06 | 73.47 | 86.05 | 83.69 |
| 80 | Serratia plymuthica tumart 205 | 72.69 | 72.10 | 98.03 | 86.24 | 73.47 | 86.64 | 84.28 |
| 81 | Serratia plymuthica A30 | 72.29 | 71.70 | 98.82 | 85.65 | 72.88 | 86.44 | 84.08 |
| 82 | Serratia plymuthica 4Rx13 | 72.29 | 71.70 | 97.83 | 85.85 | 73.08 | 86.44 | 84.28 |
| 83 | Serratia plymuthica V4 | 72.29 | 71.70 | 98.42 | 85.85 | 71.08 | 86.44 | 84.28 |
| 84 | Serratia plymuthica 3Rp8 | 72.29 | 71.70 | 98.62 | 86.05 | 73.08 | 86.64 | 84.08 |
| 85 | Serratia proteamaculans MFPA44A14 | 72.29 | 71.90 | 87.03 | 92.53 | 73.28 | 98.82 | 87.22 |
| 86 | Serratia plymuthica A153 | 72.10 | 71.51 | 99.21 | 86.05 | 72.88 | 86.64 | 84.47 |

TABLE 3-1

| [Match Count/Length] | | 1 Serratia | 2 Serratia | 3 Serratia | 4 Serratia | 5 Serratia | 6 Serratia | 7 Serratia |
|---|---|---|---|---|---|---|---|---|
| 1 | Serratia marcescens ATCC13880 | * | | | | | | |
| 2 | Serratia nematodiphila DSM21420 | 500/509 | * | | | | | |
| 3 | Serratia plymuthica NBRC102599 | 367/509 | 364/509 | * | | | | |
| 4 | Serratia proteamaculans 568 | 368/509 | 364/509 | 439/509 | * | | | |
| 5 | Serratia ureilytica Lr5/4 | 482/509 | 462/509 | 371/500 | 373/509 | * | | |
| 6 | Serratia sp. BW106 | 368/509 | 366/509 | 443/509 | 470/509 | 375/509 | * | |
| 7 | Serratia liquefaciens FK01 | 368/509 | 365/509 | 431/509 | 442/509 | 374/509 | 447/509 | * |
| 8 | Serratia sp. S119 | 483/509 | 480/509 | 371/509 | 369/509 | 466/509 | 372/509 | 371/509 |
| 9 | Serratia sp. YD25 | 470/509 | 470/509 | 369/509 | 369/509 | 476/509 | 370/509 | 371/509 |
| 10 | Serratia sp. FS14 | 502/509 | 507/509 | 365/509 | 365/509 | 464/509 | 367/509 | 367/509 |
| 11 | Serratia sp. HMSC15F11 | 483/509 | 480/509 | 373/509 | 373/509 | 465/509 | 374/509 | 374/509 |
| 12 | Serratia sp. JKS000199 | 402/509 | 462/509 | 370/509 | 372/509 | 506/509 | 374/509 | 373/509 |
| 13 | Serratia sp. TEL | 461/509 | 461/509 | 371/509 | 373/509 | 508/508 | 375/509 | 374/509 |
| 14 | Serratia sp. ISTD04 | 461/509 | 461/509 | 369/509 | 372/509 | 506/509 | 374/509 | 373/509 |
| 15 | Serratia sp. SCBI | 462/509 | 462/509 | 371/509 | 373/509 | 507/509 | 374/509 | 374/509 |
| 16 | Serratia sp. S4 | 367/509 | 363/509 | 440/509 | 502/509 | 372/509 | 468/509 | 441/509 |
| 17 | Serratia sp. C-1 | 369/509 | 366/509 | 499/509 | 438/509 | 373/509 | 441/509 | 428/509 |
| 18 | Serratia marcescens 532 | 508/509 | 499/509 | 368/509 | 367/509 | 461/509 | 367/509 | 367/509 |
| 19 | Serratia marcescens 2880STDY5683033 | 507/509 | 498/509 | 367/509 | 368/509 | 460/509 | 367/509 | 368/509 |
| 20 | Serratia marcescens WW4 | 501/509 | 506/509 | 366/509 | 366/509 | 463/509 | 368/509 | 366/509 |
| 21 | Serratia marcescens K27 | 500/509 | 505/509 | 363/509 | 363/509 | 463/509 | 365/509 | 365/509 |
| 22 | Serratia marcescens 280 | 501/509 | 506/509 | 365/509 | 365/509 | 463/509 | 367/509 | 367/509 |
| 23 | Serratia marcescens 19F | 501/509 | 506/509 | 364/509 | 365/509 | 463/509 | 367/509 | 367/509 |
| 24 | Serratia marcescens 1185 | 500/509 | 507/509 | 363/509 | 363/509 | 460/509 | 365/509 | 364/509 |

TABLE 3-2

| | | | | | | | | |
|---|---|---|---|---|---|---|---|---|
| 25 | Serratia marcescens S217 | 500/509 | 505/509 | 363/509 | 364/509 | 463/509 | 366/509 | 366/509 |
| 26 | Serratia marcescens KHCo-24B | 499/509 | 508/509 | 363/509 | 363/509 | 461/509 | 365/509 | 366/509 |
| 27 | Serratia marcescens Z6 | 499/509 | 504/509 | 365/509 | 366/509 | 461/509 | 368/509 | 366/509 |
| 28 | Serratia marcescens 546 | 498/509 | 505/509 | 364/509 | 365/509 | 460/509 | 367/509 | 365/509 |
| 29 | Serratia nematodiphila MB307 | 499/509 | 508/509 | 363/509 | 364/509 | 461/509 | 366/509 | 365/509 |
| 30 | Serratia marcescens VGH107 | 499/509 | 504/509 | 363/509 | 364/509 | 461/509 | 366/509 | 366/509 |
| 31 | Serratia marcescens MCB | 486/509 | 485/509 | 368/509 | 370/509 | 464/509 | 371/509 | 370/509 |
| 32 | Serratia marcescens AH0650 | 487/509 | 486/509 | 368/509 | 370/509 | 462/509 | 373/509 | 370/509 |
| 33 | Serratia marcescens UMH12 | 486/509 | 485/509 | 367/509 | 369/509 | 461/509 | 372/509 | 369/509 |
| 34 | Serratia sp. OMLW3 | 486/509 | 485/509 | 368/509 | 369/509 | 462/509 | 373/509 | 370/509 |
| 35 | Serratia marcescens UMH11 | 485/509 | 484/509 | 367/509 | 370/509 | 461/509 | 374/509 | 369/509 |
| 36 | Serratia marcescens UMH1 | 484/509 | 483/509 | 368/509 | 369/509 | 459/509 | 372/509 | 368/509 |
| 37 | Serratia marcescens 2880STDY568320 | 486/509 | 483/509 | 372/509 | 370/509 | 469/509 | 373/509 | 372/509 |
| 38 | Serratia marcescens 99 | 486/509 | 482/509 | 373/509 | 371/509 | 466/509 | 375/509 | 373/509 |
| 39 | Serratia marcescens 374 | 483/509 | 482/509 | 368/509 | 368/509 | 459/509 | 372/509 | 368/509 |
| 40 | Serratia marcescens 2880STDY5683036 | 485/509 | 481/509 | 372/509 | 370/509 | 465/509 | 374/509 | 372/509 |
| 41 | Serratia marcescens 2880STDY5683034 | 485/509 | 482/509 | 372/509 | 370/509 | 468/509 | 373/509 | 372/509 |
| 42 | Serratia marcescens 2880STDY5682892 | 485/509 | 482/509 | 373/509 | 371/509 | 468/509 | 374/509 | 373/509 |
| 43 | Serratia marcescens SM39 | 484/509 | 481/509 | 373/509 | 370/509 | 469/509 | 373/509 | 373/509 |
| 44 | Serratia marcescens 189 | 484/509 | 481/509 | 373/509 | 371/509 | 469/509 | 374/509 | 373/509 |
| 45 | Serratia marcescens SMB2099 | 484/509 | 481/509 | 374/509 | 370/509 | 467/509 | 375/509 | 374/509 |
| 46 | Serratia marcescens 2880STDY5682862 | 483/509 | 480/509 | 374/509 | 371/509 | 466/509 | 374/509 | 374/509 |
| 47 | Serratia marcescens SE4145 | 483/509 | 480/509 | 372/509 | 369/509 | 468/509 | 372/509 | 372/509 |
| 48 | Serratia marcescens 2880STDY5682876 | 484/509 | 481/509 | 373/509 | 371/509 | 467/509 | 374/509 | 373/500 |
| 49 | Serratia marcescens 709 | 484/509 | 481/509 | 372/509 | 370/509 | 467/509 | 373/509 | 372/509 |
| 50 | Serratia marcescens MGH136 | 483/509 | 480/509 | 371/509 | 369/509 | 468/509 | 372/509 | 371/509 |
| 51 | Serratia marcescens 2880STDY5682884 | 482/509 | 479/509 | 371/509 | 369/509 | 467/509 | 372/509 | 372/509 |
| 52 | Serratia marcescens D-3 | 484/509 | 481/509 | 372/509 | 370/509 | 467/509 | 373/509 | 372/509 |
| 53 | Serratia marcescens 2880STDY5682957 | 483/509 | 480/509 | 371/509 | 370/509 | 466/509 | 373/509 | 371/509 |
| 54 | Serratia marcescens YDC563 | 482/509 | 479/509 | 371/509 | 370/509 | 465/509 | 373/509 | 371/509 |
| 55 | Serratia marcescens 2880STDY5683035 | 483/509 | 480/509 | 372/509 | 370/509 | 466/509 | 373/509 | 372/509 |

TABLE 3-3

| | | | | | | | | |
|---|---|---|---|---|---|---|---|---|
| 56 | Serratia marcescens 2880STDY5682930 | 482/509 | 479/509 | 371/509 | 369/509 | 465/509 | 372/509 | 371/509 |
| 57 | Serratia marcescens 790 | 481/509 | 480/509 | 373/509 | 371/509 | 465/509 | 374/509 | 373/509 |
| 58 | Serratia marcescens UMH5 | 476/509 | 473/509 | 370/509 | 371/509 | 460/509 | 370/509 | 369/509 |
| 59 | Serratia marcescens 2880STDY5682988 | 475/509 | 472/509 | 370/509 | 371/509 | 459/509 | 370/509 | 389/509 |
| 60 | Serratia marcescens 945154301 | 483/509 | 480/509 | 373/509 | 373/509 | 465/509 | 375/509 | 374/509 |
| 61 | Serratia marcescens at 10508 | 482/509 | 479/509 | 374/509 | 374/509 | 464/509 | 375/509 | 375/509 |
| 62 | Serratia marcescens ML2637 | 481/509 | 478/509 | 373/509 | 374/509 | 463/509 | 375/509 | 375/509 |
| 63 | Serratia marcescens SM1978 | 480/509 | 477/509 | 373/509 | 373/509 | 462/509 | 375/509 | 375/509 |
| 64 | Serratia marcescens PWN146 | 479/509 | 476/509 | 371/509 | 371/509 | 463/509 | 371/509 | 373/509 |
| 65 | Serratia marcescens H1q | 471/509 | 471/509 | 369/509 | 369/509 | 476/509 | 370/509 | 372/509 |
| 66 | Serratia marcescens UMH6 | 464/509 | 464/509 | 370/509 | 372/539 | 507/509 | 374/509 | 373/509 |
| 67 | Serratia nematodiphila WCU338 | 464/509 | 464/509 | 370/509 | 372/509 | 506/509 | 374/509 | 373/509 |
| 68 | Serratia sp. OLEL1 | 463/509 | 463/509 | 371/509 | 373/509 | 508/509 | 375/509 | 374/509 |
| 69 | Serratia marcescens 7209 | 463/509 | 463/509 | 369/509 | 371/509 | 506/509 | 373/509 | 372/509 |
| 70 | Serratia marcescens sicaria (Ss1) | 463/509 | 463/509 | 370/509 | 372/509 | 506/509 | 373/509 | 373/509 |
| 71 | Serratia sp. OLFL2 | 462/509 | 462/509 | 370/509 | 372/509 | 507/509 | 374/509 | 373/509 |
| 72 | Serratia marcescens BIDMC 81 | 462/509 | 462/509 | 371/509 | 373/509 | 507/509 | 375/509 | 374/509 |
| 73 | Serratia marcescens BIDMC 50 | 462/509 | 462/509 | 370/509 | 372/509 | 505/509 | 374/509 | 373/509 |
| 74 | Serratia marcescens UMH7 | 461/509 | 461/509 | 371/509 | 373/509 | 508/509 | 375/509 | 374/509 |
| 75 | Serratia marcescens RSC-14 | 461/509 | 461/509 | 371/509 | 374/509 | 505/509 | 376/509 | 375/509 |
| 76 | Serratia marcescens SMO3 | 470/509 | 470/509 | 368/509 | 368/509 | 476/509 | 369/509 | 371/509 |
| 77 | Serratia marcescens 90-166 | 459/509 | 457/509 | 369/509 | 374/509 | 492/509 | 375/509 | 372/509 |
| 78 | Serratia marcescens UMH2 | 462/509 | 462/509 | 371/509 | 373/509 | 505/509 | 375/509 | 374/509 |
| 79 | Serratia plymuthica AS9 | 369/509 | 366/509 | 492/509 | 433/509 | 374/509 | 438/509 | 426/509 |
| 80 | Serratia plymuthica tumat 205 | 370/509 | 367/509 | 499/509 | 439/509 | 374/509 | 441/509 | 429/509 |
| 81 | Serratia plymuthica A30 | 368/509 | 365/509 | 503/509 | 436/509 | 371/509 | 440/509 | 428/509 |
| 82 | Serratia plymuthica 4Rx13 | 368/509 | 365/509 | 498/509 | 437/509 | 372/509 | 440/509 | 429/509 |
| 83 | Serratia plymuthica V4 | 368/509 | 365/509 | 501/509 | 437/509 | 372/509 | 440/509 | 429/509 |
| 84 | Serratia plymuthica 3Rp8 | 368/509 | 365/509 | 502/509 | 438/509 | 372/509 | 441/509 | 428/509 |
| 85 | Serratia proteamaculans MFPA44A14 | 368/509 | 366/509 | 443/509 | 471/509 | 373/509 | 503/509 | 444/509 |
| 86 | Serratia plymuthica A153 | 367/509 | 364/509 | 505/509 | 438/509 | 371/509 | 441/509 | 430/509 |

[0056] The nucleic acids encoding the polypeptides described in (a) to (c) according to the present invention may contain an additional sequence that encodes a peptide or protein added to the original polypeptides at the N terminus andor the C terminus. Examples of such a peptide or protein can include secretory signal sequences, translocation proteins, binding proteins, peptide tags for purification, and fluorescent proteins. Among those peptides or proteins, a peptide or protein with a desired function can be selected depending on the purpose and can be added to the polypeptides of the present invention by those skilled in the art. It should be noted that the amino acid sequence of such a peptide or protein is excluded from the calculation of sequence identity.

[0057] The nucleic acids encoding the polypeptides represented by SEQ ID NOs: 1 to 86 are not specifically limited, provided that the nucleic acids have nucleotide sequences that can be translated to the amino acid sequences represented by SEQ ID NOs: 1 to 86, and the nucleotide sequences can be deteunined considering the set of codons (standard genetic code) corresponding to each amino acid. In this respect, the nucleotide sequences may be redesigned using codons that are frequently used by a host microorganism used in the present invention.

[0058] Specific examples of the nucleotide sequences of the nucleic acids that encode the polypeptides with the amino acid sequences represented by SEQ ID NOs: 1 to 86 include the nucleotide sequences represented by SEQ ID NOs: 87 to 172.

[0059] In the present invention, whether or not a polypeptide encoded by a certain nucleic acid has 3-oxoadipyl-CoA reductase activity is determined as follows: transformants A and B below are produced and grown in a culture test; if 3-hydroxyadipic acid or α-hydromuconic acid is confirmed in the resulting culture medium, it is judged that the nucleic acid encodes a polypeptide having 3-oxoadipyl-CoA reductase activity. The determination method will be described using the scheme 1 below which shows a biosynthesis pathway.

[chemical structure]

[0060] The above scheme 1 shows an exemplary reaction pathway required for the production of 3-hydroxyadipic acid, α-hydromuconic acid, andor adipic acid. In this scheme, the reaction A represents a reaction that generates 3-oxoadipyl-CoA and coenzyme A from acetyl-CoA and succinyl-CoA. The reaction B represents a reaction that generates 3-hydroxyadipyl-CoA from 3-oxoadipyl-CoA. The reaction C represents a reaction that generates 2,3-dehydroadipyl-CoA from 3-hydroxyadipyl-CoA. The reaction D represents a reaction that generates adipyl-CoA from 2,3-dehydroadipyl-CoA. The reaction E represents a reaction that generates 3-hydroxyadipic acid from 3-hydroxyadipyl-CoA. The reaction F represents a reaction that generates α-hydromuconic acid from 2,3-dehydroadipyl-CoA. The reaction G represents a reaction that generates adipic acid from adipyl-CoA.

[0061] The transformant A has enzymes that catalyze the reactions A, E, and F. The transformant B has enzymes that catalyze the reactions A, C, E, and F.

[0062] The transformant A is first produced. Plasmids fbr the expression of the enzymes that catalyze the reactions A, E, and F, respectively, are produced. The reactions E and F can be catalyzed by an identical enzyme. The plasmids are introduced into Escherichia coli strain BL21 (DE3), which is a microorganism strain lacking abilities to produce all of 3-hydroxyadipic acid, α-hydromuconic acid, and adipic acid. Into the obtained transformant, an expression plasmid carrying a nucleic acid that encodes a polypeptide to be analyzed for the presence of the enzymatic activity of interest and is integrated downstream of an appropriate promoter is introduced to obtain the transformant A. The transformant A is cultured, and the post-culture fluid is examined for the presence of 3-hydroxyadipic acid. Once the presence of 3-hydroxyadipic acid in the culture fluid is confirmed, the transformant B is then produced. The transformant B is obtained by producing a plasmid for the expression of an enzyme that catalyzes the reaction C and introducing the resulting plasmid into the transformant A. The transformant B is cultured, and the post-culture fluid is examined for the presence of α-hydromuconic acid. When the presence of α-hydromuconic acid in the post-culture fluid is confirmed, it indicates that 3-hydroxyadipic acid produced in the transformant A and α-hydromuconic acid produced in the transformant B are generated via production of 3-hydroxyadipyl-CoA, and that the polypeptide of interest has 3-oxoadipyl-CoA reductase activity.

[0063] As the gene encoding the enzyme that catalyzes the reaction A, pcaF from Pseudomonas putida strain KT2440 (NCBI Gene ID: 1041755; SEQ ID NO: 174) is used.

[0064] As the genes encoding the enzyme that catalyzes the reactions E and F, a continuous sequence including the full lengths of peal and peal from Pseudomonas putida strain KT2440 (NCBI Gene IDs: 1046613 and 1046612; SEQ ID NOs: 175 and 176) is used. The polypeptides encoded by peal and peal forms a complex and then catalyze the reactions E and F.

[0065] As the nucleic acid encoding the enzyme that catalyzes the reaction C, the paaF gene from Pseudomonas putida strain KT2440 (NCBI Gene ID: 1046932, SEQ ID NO: 177) is used.

[0066] The method of culturing the transformant A and the transformant B is as follows. Antibiotics for stable maintenance of the plasmids and inducer substances for induction of expression of the polypeptides encoded by the incorporated nucleic acids may be added as appropriate to the culture. A loopful of either the transformant A or B is inoculated into 5 mL of the culture medium I (10 gL Bacto Tryptone (manufactured by Difco Laboratories), 5 gL Bacto Yeast Extract (manufactured by Difco Laboratories), 5 gL sodium chloride) adjusted at pH 7 and is cultured at 30° C. with shaking at 120 min⁻¹ for 18 hours to prepare a preculture fluid. Subsequently, 0.25 mL of the preculture fluid is added to 5 mL of the culture medium II (10 gL succinic acid, 10 gL glucose, 1 gL ammonium sulfate, 50 mM potassium phosphate, 0.025 gL magnesium sulfate, 0.0625 mgL iron sulfate, 2.7 mgL manganese sulfate, 0.33 mgL calcium chloride, 1.25 gL sodium chloride, 2.5 gL Bacto Tryptone, 1.25 gL Bacto Yeast Extract) adjusted to pH 6.5 and is cultured at 30° C. with shaking at 120 min⁻¹ for 24 hours. The obtained culture fluid is examined for the presence of 3-hydroxyadipic acid or α-hydromuconic acid.

[0067] The presence of 3-hydroxyadipic acid or α-hydromuconic acid in the culture fluid can be confirmed by centrifuging the culture fluid and analyzing the supernatant with LC-MSMS. The analysis conditions are as described below:
[0068] HPLC: 1290 Infinity (manufactured by Agilent Technologies, Inc.)
[0069] Column: Synergi hydro-RP (manufactured by Phenomenex Inc.), length: 100 mm,
[0070] internal diameter: 3 mm, particle size: 2.5 μm
[0071] Mobile phase: 0.1% aqueous formic acid solution methanol =7030
[0072] Flow rate: 0.3 mLmin
[0073] Column temperature: 40° C.
[0074] LC detector: DAD (210 nm)
[0075] MSMS: Triple-Quad LCMS (manufactured by Agilent Technologies, Inc.) Ionization method: ESI in negative mode.

[0076] The 3-oxoadipyl-CoA reductase activity value can be calculated by quantifying 3-hydroxyadipyl-CoA generated from 3-oxoadipyl-CoA used as a substrate by using purified 3-oxoadipyl-CoA reductase, wherein the 3-oxoadipyl-CoA is prepared from 3-oxoadipic acid by an enzymatic reaction. The specific method is as follows.

[0077] 3-Oxoadipic acid can be prepared by a known method (for example, a method described in Reference Example 1 of WO 2017099209).

[0078] Preparation of 3-oxoadipyl-CoA solution: A PCR using the genomic DNA of Pseudomonas putida strain KT2440 as a template is performed in accordance with routine procedures, to amplify a nucleic acid encoding a CoA transferase (peal and pcaJ; NCBI-GenelDs: 1046613 and 1046612) in the full-length form. The nucleotide sequences of primers used in this PCR are, for example, those represented by SEQ ID NOs: 194 and 195. The amplified fragment is inserted into the Kpnl site of pRSF-1b (manufactured by Novagen), an expression vector for E. coli, in-frame with the histidine-tag sequence. The plasmid is introduced into E. coli BL21 (DE3), and the enzyme is expressed from the plasmid under isopropyl-β-thiogalactopyranoside (IPTG) induction and is then purified using the histidine tag from the culture fluid in accordance with routine procedures to obtain a CoA transferase solution. The solution is used to prepare an enzymatic reaction solution for 3-oxoadipyl-CoA preparation with the following composition, and the enzymatic reaction solution is kept at 25° C. for 3 minutes to allow the reaction to proceed and is then filtered through a UF membrane (Amicon Ultra-0.5mL 10K; manufactured by Merck Millipore) to remove the enzyme, and the obtained filtrate is designated as 3-oxoadipyl-CoA solution.

### (Enzymatic Reaction Solution)

[0079] 100 mM Tris-HCl (pH 8.2)

[0080] 10 mM MgCl₂

[0081] 0.5 mM succinyl-CoA

[0082] 5 mM 3-oxoadipic acid sodium salt

[0083] 2 μM CoA transferase.

[0084] Identification of 3-oxoadipyl-CoA reductase activity: A PCR using the genomic DNA of a microorganism strain as a template is performed in accordance with routine procedures, to amplify a nucleic acid encoding 3-oxoadipyl-CoA reductase in the full-length form. The nucleotide sequences of primers used in this PCR are, for example, those represented by SEQ ID NOs: 196 and 197. The amplified fragment is inserted into the Ba.mHI site of pACYCDuet-1 (manufactured by Novagen), an expression vector for E. coli, in-frame with the histidine-tag sequence. The plasmid is introduced into E. coli BL21 (DE3), and the enzyme is expressed from the plasmid under isopropyl(3-thiogalactopyranoside (IPTG) induction and is then purified using the histidine tag from the culture fluid in accordance with routine procedures to obtain a 3-oxoadipyl-CoA reductase solution. The 3-oxoadipyl-CoA reductase activity can be determined by using the enzyme solution to prepare an enzymatic reaction solution with the following composition and quantifying 3-hydroxyadipyl-CoA generated at 25° C.

### (Enzymatic Reaction Solution)

[0085] 100 mM Tris-HCl (pH 8.2)

[0086] 10 mM MgCl₂

[0087] 150 μLmL 3-oxoadipyl-CoA solution

[0088] 0.5 mM NADH

[0089] 1 mM dithiothreitol

[0090] 10 μM 3-oxoadipyl-CoA reductase.

[0091] In the present invention, the genetically modi lied microorganism in which the expression of any one of the polypeptides described in (a) to (c) is enhanced is a microorganism as a host which originally has a nucleic acid encoding any one of the polypeptides described in (a) to (c) and is genetically modified for increased expression of any one of the polypeptides described in (a) to (c) which are owned by the host microorganism.

[0092] Specific examples of the microorganism which originally has a nucleic acid encoding any one of the polypeptides described in (a) to (c) include the following microorganisms of the genus Serratia, including Serratia marcescens (a microorganism having the sequences represented by SEQ ID NOs: 1, 18 to 28, 30 to 33, 35 to 66, 69, 70, 72 to 78, and 79), Serratia nematodiphila (a microorganism having the sequences represented by SEQ ID NOs: 2, 29, and 67), Serratia plymuthica (a microorganism having the sequences represented by SEQ ID NOs: 3, 79 to 84, and 86), Serratia proteamaculans (a microorganism having the sequences represented by SEQ ID NOs: 4 and 85), Serratia ureilytica (a microorganism having the sequence represented by SEQ ID NO: 5), Serratia sp. BW106 (a microorganism having the sequence represented by SEQ ID NO: 6), Serratia liquefaciens (a microorganism having the sequence represented by SEQ ID NO: 7), Serratia sp. S119 (a microorganism having the sequence represented by SEQ ID NO: 8), Serratia sp. YD25 (a microorganism having the sequence represented by SEQ ID NO: 9), Serratia sp. FS14 (a microorganism having the sequence represented by SEQ ID NO: 10). Serratia sp. HMSC15F11 (a microorganism having the sequence represented by SEQ ID NO: I1), Serratia sp. JKS000199 (a microorganism having the sequence represented by SEQ ID NO: 12), Serratia sp. TEL (a microorganism having the sequence represented by SEQ ID NO: 13), Serratia sp. ISTD04 (a microorganism having the sequence represented by SEQ ID NO: 14), Serratia sp. SCBI (a microorganism having the sequence represented by SEQ ID NO: 15), Serratia sp. S4 (a microorganism having the sequence represented by SEQ ID NO: 16), Serratia sp. C-1 (a microorganism having the sequence represented by SEQ ID NO: 17), Serratia sp. OMLW3 (a microorganism having the sequence represented by SEQ ID NO: 34), Serratia sp. OLEL1 (a microorganism having the sequence represented by SEQ ID NO: 68), Serratia sp. OLEL2 (a microorganism having the sequence represented by SEQ ID NO: 71), and the like.

[0093] Each of the polypeptides as described above in (a), (b), and (c) also has 3-hydroxybutyryl-CoA dehydrogenase activity, and the 3-hydroxybutyryl-CoA dehydrogenase is encoded by a 3-hydroxybutyryl-CoA dehydrogenase gene, which forms a gene cluster with the 5-aminolevulinic acid synthase gene in the microorganisms of the genus Serratia.

[0094] As used herein, the term “gene cluster” in the phrase “the 3-hydroxybutyryl-CoA dehydrogenase gene, which forms a gene cluster with 5-aminolevulinic acid synthase gene in the microorganisms of the genus Serratia” refers to a region in which a set of nucleic acids encoding proteins with related functions are located in close proximity to each other. Specific components in a gene cluster include, for example, nucleic acids which are transcribed under the control of a single transcription regulator, and those in an operon which are transcribed under the control of a single transcription promoter. Whether or not a certain nucleic acid is a nucleic acid component of a gene cluster can also be investigated using an online gene cluster search program, such as antiSMASH. Additionally, whether or not a certain polypeptide is classified as a 3-hydroxybutyryl-CoA dehydrogenase or a 5-aminolevulinic acid synthase can be determined by BLAST (Basic Local Alignment Search Tool) searching on a website, such as that of NCR! (National Center for Biotechnology Information) or KEGG (Kyoto Encyclopedia of Genes and Genomes), to find any enzyme with a high degree of homology to the polypeptide in amino acid sequence. For example, the amino acid sequence represented by SEQ ID NO: 4 is registered in an NCBI database under Protein ID: ABV40935.1, which is annotated as a putative protein with 3-hydroxybutyryl-CoA dehydrogenase activity, as judged from the amino acid sequence. A gene encoding the amino acid sequence represented by SEQ ID NO: 4 is registered in an NCBI database under Gene ID: CP000826.1 and can be identified through a database search as conserved in the genome of Serratia proteamaculans strain 568 or as conserved in the region from 2015313 to 2016842 bp on the sequence of Gene ID: CP000826.1. Furthermore, the positional information of the gene can lead to identification of the sequences of flanking genes, from which the gene can be found to form a gene cluster with the 5-aminolevulinic acid synthase gene (Protein ID: ABV40933.1), as shown in FIG. 1. Similarly, for the amino acid sequences represented by SEQ ID NOs: 1 to 3, 6 to 20, 22 to 30,32 to 35,37,38,40,42 to 48,51 to 56, 59 to 63, 65, 66, 68 to 73, 75 to 81, and 83 to 85, the information can be checked on the NCBI site with the Protein IDs and Gene IDs presented in Tables 3-4 and 3-5.

TABLE 3-4

| SEQ | | |
|---|---|---|
| ID | | |
| NO: | Gene ID:position (from . . . to) | Protein ID |
| 1 | JMPQ01000047.1:133194 . . . 134723 | KFD11732.1 |
| 2 | JPUX00000000.1:4202615 . . . 4204144 | WP_033633399.1 |
| 3 | BCTU01000013.1:85647 . . . 87176 | WP_063199278.1 |
| 4 | CP000826.1:2015313 . . . 2016842 | ABV40935.1 |
| 6 | MCGS01000002.1:43811 . . . 45340 | WP_099061672.1 |
| 7 | CP006252.1:1825868 . . . 1827397 | AGQ30498.1 |
| 8 | MSFH01000022.1:147976 . . . 149505 | ONK16968.1 |
| 9 | CP016948.1:1213474 . . . 1215003 | AOE98783.1 |
| 10 | CP005927.1:4244665 . . . 4246194 | WP_044031504.1 |
| 11 | LWNG01000196.1:83086 . . . 84615 | OFS85208.1 |
| 12 | LT907843.1:1172733 . . . 1174262 | SNY82966.1 |
| 13 | LDEG01000005.1:19627 . . . 21156 | KLE40298.1 |
| 14 | MBDW01000089.1:53478 . . . 55007 | ODJ15373.1 |
| 15 | CP003424.1:1869825 . . . 1871300 | AIM21329.1 |
| 16 | APLA01000003.1:1964823 . . . 1966352 | WP_017892361.1 |
| 17 | CAQO01000118.1:101692 . . . 103221 | WP_062792820.1 |
| 18 | JVDI01000070.1:19399 . . . 20928 | WP_049300487.1 |
| 19 | FCGF01000001.1:938090 . . . 939619 | WP_060444298.1 |
| 20 | NC_020211.1:1963542 . . . 1965071 | WP_015377392.1 |
| 22 | JVNC01000043.1:47711 . . . 49240 | WP_049187553.1 |
| 23 | MCNK01000010.1:591271 . . . 592800 | WP_076740355.1 |
| 24 | JVZV01000138.1:53080 . . . 54609 | WP_049277247.1 |
| 25 | CP021984.1:1963542 . . . 1965071 | WP_088381461.1 |
| 26 | NERL01000025.1:86571 . . . 88100 | WP_060559176.1 |
| 27 | MTEH01000001.1:215863 . . . 217392 | WP_085336366.1 |
| 28 | JVCS01000001.1:19397 . . . 20926 | WP_049239700.1 |
| 29 | MTBJ01000002.1:216232 . . . 217761 | WP_082996863.1 |
| 30 | AORJ01000010.1:70272 . . . 71801 | WP_033645451.1 |
| 32 | LFJS01000012.1:944087 . . . 945616 | WP_025302345.1 |
| 33 | CP018930.1:1161338 . . . 1162867 | WP_060447438.1 |
| 34 | MSTK01000013.1:54046 . . . 55575 | WP_099817374.1 |
| 35 | CP018929.1:1167577 . . . 1170106 | WP_089180755.1 |
| 37 | FCGS01000006.1:98915 . . . 100444 | WP_060438851.1 |
| 38 | MQRI01000002.1:585500 . . . 587029 | WP_060387554.1 |
| 40 | FCFE01000001.1:962839 . . . 964368 | WP_060435888.1 |
| 42 | FCIO01000002.1:145369146898 . . . | WP_033637938.1 |
| 43 | AP013063.1:1329259 . . . 1330788 | WP_041034581.1 |
| 44 | MQRJ01000004.1:178926 . . . 180455 | WP_074026553.1 |
| 45 | HG738868.1:1928329 . . . 1929858 | WP_060437960.1 |

TABLE 3-5

| SEQ | | |
|---|---|---|
| ID | | |
| NO: | Gene ID:position (from . . . to) | Protein ID |
| 46 | FCHQ01000006.1:51377 . . . 52906 | WP_060420535.1 |
| 47 | NPGG01000001.1:301231 . . . 302760 | WP_047568134.1 |
| 48 | FCME01000002.1:205632 . . . 207161 | WP_060443161.1 |
| 51 | FCIH01000014.1:52403 . . . 53932 | WP_060429049.1 |
| 52 | NBWV01000007.1:110621 . . . 112150 | WP_039566649.1 |
| 53 | FCKI01000001.1:594106 . . . 595635 | WP_060429902.1 |
| 54 | JPOB01000010.1:81351 . . . 82880 | WP_033654196.1 |
| 55 | FCFI01000001.1:582222 . . . 583751 | WP_060443342.1 |
| 56 | FCML01000001.1:1005802 . . . 1007331 | WP_060456892.1 |
| 59 | FCMR01000001.1:1873566 . . . 1875095 | WP_060440240.1 |
| 60 | LJEV02000002.1:115432 . . . 116961 | WP_047727865.1 |
| 61 | NPIX01000027.1:38249 . . . 39778 | WP_094461128.1 |
| 62 | NDXU01000091.1:70343 . . . 71872 | WP_048233299.1 |
| 63 | FNXW01000055.1:13619 . . . 15148 | WP_080490898.1 |
| 65 | AYMO01000023.1:23978 . . . 25507 | WP_025160335.1 |
| 66 | CP018926.1:1215941 . . . 1217470 | WP_089191486.1 |
| 68 | MORG01000026.1:13723 . . . 15252 | WP_099782744.1 |
| 69 | PEHC01000008.1:57274 . . . 58803 | PHY81681.1 |
| 70 | MEDA01000063.1:13491 . . . 15020 | WP_072627918.1 |
| 71 | MORH01000030.1:13633 . . . 15162 | WP_099789708.1 |
| 72 | KK214286.1:392757 . . . 394286 | WP_033650708.1 |
| 73 | KI929259.1:1574567 . . . 1576096 | WP_033642621.1 |
| 75 | CP012639.1:230596 . . . 232125 | WP_060659686.1 |
| 76 | LZOB01000011.1:1613417 . . . 1614946 | WP_074054551.1 |
| 77 | LCWI01000024.1:46336 . . . 47865 | WP_046899223.1 |
| 78 | CP018924.1:1213305 . . . 1214834 | WP_089194521.1 |
| 79 | NC_015567.1:1930552 . . . 1932081 | WP_013812379.1 |
| 80 | MQML01000205.1:9362 . . . 10891 | WP_073439751.1 |
| 81 | AMSV01000032.1:251478 . . . 253007 | WP_006324610.1 |
| 83 | CP007439.1:1991332 . . . 1992861 | AHY06789.1 |
| 84 | CP012096.1:319897 . . . 321426 | WP_037432641.1 |
| 85 | FWWG01000018.1:38528 . . . 40057 | WP_085116175.1 |

[0095] A nucleic acid encoding a polypeptide encoded by the 3-hydroxybutyryl-CoA dehydrogenase gene of a microorganism of the genus Serratia , which forms a gene cluster with the 5-aminolevulinic acid synthase gene, is hereinafter referred to as “the 3-hydroxybutyryl-CoA dehydrogenase gene used in the present invention,” and the polypeptide encoded by the 3-hydroxybutyryl-CoA dehydrogenase gene is referred as “the 3-hydroxybutyryl-CoA dehydrogenase used in the present invention.”

[0096] A gene cluster including the 3-hydroxybutyryl-CoA dehydrogenase gene used in the present invention may include other nucleic acids, provided that the gene cluster includes at least the 3-hydroxybutyryl-CoA dehydrogenase gene and the 5-aminolevulinic acid synthase gene. FIG. 1 shows a specific example of the gene cluster including the 3-hydroxybutyryl-CoA dehydrogenase gene used in the present invention.

[0097] Specific examples of the microorganisms of the genus Serratia that contain the above gene cluster include S. marcescens, S. nematodiphila, S. plymuthica, S. proteamaculans, S. ureilytica, S. liquelaciens. Serratia sp. BW106, Serratia sp. S119, Serratia sp. YD25, Serratia sp. FS14. Serratia sp. HMSC15F11, Serratia sp. JKS000199, Serratia sp. TEL, Serratia sp. ISTD04, Serratia sp. SCBI, Serratia sp. S4, Serratia sp. C-1, Serratia sp. OMLW3. Serratia sp. OLEL1, Serratia sp. OLEL2, and S. liquefaciens.

[0098] The 3-hydroxybutyryl-CoA dehydrogenase used in the present invention has an excellent 3-oxoadipyl-CoA reductase activity. Whether or not a 3-hydroxybutyryl-CoA dehydrogenase-encoding nucleic acid has a 3-oxoadipyl-CoA reductase activity can be determined by the same method as described above.

[0099] The polypeptide encoded by the 3-hydroxybutyryl-CoA dehydrogenase gene used in the present invention is characterized by containing the common sequence 1. Specific examples of amino acid sequences of such polypeptides include the amino acid sequences represented by SEQ ID NOs: 1 to 86.

[0100] In the present invention, a nucleic acid encoding a polypeptide composed of the same amino acid sequence as that represented by any one of SEQ ID NOs: 8 to 86, except that one or several amino acids are substituted, deleted, inserted, andor added, and having an enzymatic activity that catalyzes a reaction to reduce 3-oxoadipyl-CoA to 3-hydroxyadipyl-CoA can also be suitable for use, provided that the common sequence 1 is contained in the polypeptide. In this respect, the range represented by the phrase “gone or several” is preferably 10 or less, more preferably 5 or less, especially preferably 4 or less, and most preferably one or two. In the case of amino acid substitution, the activity of the original polypeptide is more likely to be maintained when an amino acid(s) isare replaced by an amino acid(s) with similar properties (i.e., conservative substitution as described above). A nucleic acid encoding a polypeptide composed of an amino acid sequence with a sequence identity to not less than 70%, preferably not less than 80%, more preferably not less than 85%, further preferably not less than 90%, still further preferably not less than 95%, yet further preferably not less than 97%, even further preferably not less than 99%, to the sequence represented by any one of SEQ ID NOs: 8 to 86 and having an enzymatic activity that catalyzes a reaction to reduce 3-oxoadipyl-CoA to 3-hydroxyadipyl-CoA can also be suitably used.

[0101] On the other hand, examples of a polypeptide that is not the 3-hydroxybutyryl-CoA dehydrogenase used in the present invention but has 3-oxoadipyl-CoA reductase activity include PaaH from Pseudomonas putida strain KT2440 (SEQ ID NO: 178), PaaH from Escherichia coli strain K-12 substrain MG1655 (SEQ ID NO: 179). DcaH from Acinetobacter haylyi strain ADP1 (SEQ ID NO: 180), and PaaH from Serratia plymuthica strain NBRC102599 (SEQ ID NO: 181). As shown in Tables 4 and 5, these polypeptides are found not to contain the common sequence I. It should be noted that those polypeptides are neither (b) polypeptides composed of the same amino acid sequence as that represented by any one of SEQ ID NOs: 1 to 7, except that one or several amino acids are substituted, deleted, inserted, andor added, and having an enzymatic activity that catalyzes a reaction to reduce 3-oxoadipyl-CoA to 3-hydroxyadipyl-CoA, nor (c) polypeptides having an amino acid sequence with a sequence identity of not less than 70% to the sequence represented by any one of SEQ ID NOs: 1 to 7 and having an enzymatic activity that catalyzes a reaction to reduce 3-oxoadipyl-CoA to 3-hydroxyadipyl-CoA.

TABLE 4

| | | | 5 10 15 20 25 30 35 40 |
|---|---|---|---|
| | | | Consensus sequence1 |
| | | | GAGTMGRG\|AYLXAXXX\|XTXLYN |
| 1. | 1 | Serratia marcescens ATCC13880 | MAESNAA\|QSAAI\|GAGTMGRG\|AYLFAQKG\|RTVLYNRN |
| 2. | 2 | Serratia nematodiphila DSM21420 | MAESNAA\|QSAAI\|GAGTMGRG\|AYLFAQKG\|PTMLYNRN |
| 3. | 3 | Serratia plymuthica NBRC102599 | MAENNSA\|RSAAV\|GAGTMGRG\|AYLLALNG\|RTVLYNRN |
| 4. | 4 | Serratia proteamaculans 568 | MAENNSA\|HSVAV\|GAGTMGRG\|AYLLAQNG\|RTLLYNRS |
| 5. | 5 | Serratia ureilytica Lr5/4 | MAESNAA\|QSAAI\|GAGTMGRG\|AYLLAQKS\|RTVLYNRN |
| 6. | 6 | Serratia sp. BW106 | MAENNSA\|HSVAV\|GAGTMGRG\|AYLLAQNG\|RTLLYNRS |
| 7. | 7 | Serratia liquefaciens FK01 | MAENNTA\|DSVAV\|GAGTMGRG\|AYLLALNG\|RTLLYNRN |
| 8. | 8 | Serratia sp. S119 | MAESNAA\|QSAAI\|GAGTMGRG\|AYLFAQKG\|RTVLYNRN |
| 9. | 9 | Serratia sp. YD25 | MAERNAA\|QSAAI\|GAGTMGRG\|AYLFAQKG\|RTVLYNRN |
| 10. | 10 | Serratia sp. FS14 | MAESNAA\|QSAAI\|GAGTMGRG\|AYLFAQKG\|PTMLYNRN |
| 11. | 11 | Serratia sp. HMSC15F11 | MAESNAA\|QSAAI\|GAGTMGRG\|AYLFAQKG\|RTVLYNRN |
| 12. | 12 | Serratia sp. JKS000199 | MAESNAA\|QSAAI\|GAGTMGRG\|AYLLAQKS\|RTVLYNRN |
| 13. | 13 | Serratia sp. TEL | MAESNAA\|QSAAI\|GAGTMGRG\|AYLLAQKS\|RTVLYNRN |
| 14. | 14 | Serratia sp. ISTD04 | MAESNAA\|QSAAI\|GAGTMGRG\|AYLLAQKS\|RTVLYNRN |
| 15. | 15 | Serratia sp. SCBI | MAESNAA\|QSAAI\|GAGTMGRG\|AYLLAQKS\|RTVLYNRN |
| 16. | 16 | Serratia sp. S4 | MAENNSA\|HSVAV\|GAGTMGRG\|AYLLAQNG\|RTLLYNRS |
| 17. | 17 | Serratia sp. C-1 | MAENNSA\|RSAAV\|GAGTMGRG\|AYLLALNG\|RTVLYNRN |
| 18. | 18 | Serratia marcescens 532 | MAESNAA\|QSAAI\|GAGTMGRG\|AYLFAQKG\|RTVLYNRN |
| 19. | 19 | Serratia marcescens 2880STDY5683033 | MAESNAA\|QSAAI\|GAGTMGRG\|AYLFAQKG\|RTVLYNRN |
| 20. | 20 | Serratia marcescens WW4 | MAESNAA\|QSAAI\|GAGTMGRG\|AYLFAQKG\|PTMLYNRN |
| 21. | 21 | Serratia marcescens K27 | MAESNAA\|QSAAI\|GAGTMGRG\|AYLFAQKG\|PTMLYNRN |
| 22. | 22 | Serratia marcescens 280 | MAESNAA\|QSAAI\|GAGTMGRG\|AYLFAQKG\|PTMLYNRN |
| 23. | 23 | Serratia marcescens 19F | MAESNAA\|QSAAI\|GAGTMGRG\|AYLFAQKG\|PTMLYNRN |
| 24. | 24 | Serratia marcescens 1185 | MAESNAA\|QSAAI\|GAGTMGRG\|AYLFAQKG\|PTMLYNRN |
| 25. | 25 | Serratia marcescens S217 | MAESNAA\|QSAAI\|GAGTMGRG\|ATLFAQKG\|PTMLYNRN |
| 26. | 26 | Serratia marcescens KHCo-24B | MAESNAA\|QSAAI\|GAGTMGRG\|AYLFAQKG\|PTMLYNRN |
| 27. | 27 | Serratia marcescens Z6 | MAESNAA\|QSAAI\|GAGTMGRG\|AYLFAQKG\|PTMLYNRN |
| 28. | 28 | Serratia marcescens 546 | MAESNAA\|QSAAI\|GAGTMGRG\|AYLFAQKG\|PTMLYNRN |
| 29. | 29 | Serratia nematodiphila MB307 | MAESNAA\|QSAAI\|GAGTMGRG\|AYLFAQKG\|PTMLYNRN |
| 30. | 30 | Serratia marcescens VGH107 | MAESNAA\|QSAAI\|GAGTMGRG\|AYLFAQKG\|PTMLYNRN |
| 31. | 31 | Serratia marcescens MCB | MAESNAA\|QSAAI\|GAGTMGRG\|AYLFAQKG\|RTVLYNRN |
| 32. | 32 | Serratia marcescens AH0650 | MAESNAA\|QSAAI\|GAGTMGRG\|AYLFAQKG\|RTVLYNRN |
| 33. | 33 | Serratia marcescens UMH12 | MAESNAE\|QSAAI\|GAGTMGRG\|AYLFAQKG\|RTVLYNRN |
| 34. | 34 | Serratia sp. OMLW3 | MAESNAA\|QSAAI\|GAGTMGRG\|AYLFAQKG\|RTVLYNRN |
| 35. | 35 | Serratia marcescens UMH11 | MAESNAA\|QSAAI\|GAGTMGRG\|AYLFAQKG\|RTVLYNRS |
| 36. | 36 | Serratia marcescens UMH1 | MAESNAA\|QSAAI\|GAGTMGRG\|AYLFAQKG\|RTVLYNRN |
| 37. | 37 | Serratia marcescens 2880STDY5683020 | MAESNAA\|QSAAI\|GAGTMGRG\|AYLFAQKG\|RTVLYNRN |
| 38. | 38 | Serratia marcescens 99 | MAESNAA\|QSAAI\|GAGTMGRG\|AYLFAQKG\|RTVLYNRN |
| 39. | 39 | Serratia marcescens 374 | MAESNAA\|QSAAI\|GAGTMGRG\|AYLFAQKG\|RTVLYNRN |
| 40. | 40 | Serratia marcescens 2880STDY5683036 | MAESNAA\|QSAAI\|GAGTMGRG\|AYLFAQKG\|RTVLYNRN |
| 41. | 41 | Serratia marcescens 2880STDY5683034 | MAESNAA\|QSAAI\|GAGTMGRG\|AYLFAQKG\|RTVLYNRN |
| 42. | 42 | Serratia marcescens 2880STDY5682892 | MAESNAA\|QSAAI\|GAGTMGRG\|AYLFAQKG\|RTVLYNRN |
| 43. | 43 | Serratia marcescens SM39 | MAESNAA\|QSAAI\|GAGTMGRG\|AYLFAQKG\|RTVLYNRN |

TABLE 5

| | | | 5 10 15 20 25 30 35 40 |
|---|---|---|---|
| | | | Consensus sequence1 |
| | | | GAGTMGRG\|AYLXAXXX\|XTXLYN |
| 44. | 44 | Serratia marcescens 189 | MAESNAA\|QSAAI\|GAGTMGRG\|AYLFAQKG\|RTVLYNRN |
| 45. | 45 | Serratia marcescens SMB2099 | MAESNAA\|QSAAI\|GAGTMGRG\|AYLFAQKG\|RTVLYNRN |
| 46. | 46 | Serratia marcescens 2880STDY5682862 | MAESNAA\|QSAAI\|GAGTMGRG\|AYLFAQKG\|RTVLYNRN |
| 47. | 47 | Serratia marcescens SE4145 | MAESNAE\|QSAAI\|GAGTMGRG\|AYLFAQKG\|RTVLYNRN |
| 48. | 48 | Serratia marcescens 2880STDY5682876 | MAESNAA\|QSAAI\|GAGTMGRG\|AYLFAQKG\|RTVLYNRN |
| 49. | 49 | Serratia marcescens 709 | MAESNAA\|QSAAI\|GAGTMGRG\|AYLFAQKG\|RTVLYNRN |
| 50. | 50 | Serratia marcescens MGH136 | MAESNAA\|QSAAI\|GAGTMGRG\|AYLFAQKG\|RTVLYNRN |
| 51. | 51 | Serratia marcescens 2880STDY5682884 | MAESNAA\|QSAAI\|GAGTMGRG\|AYLFAQKG\|RTVLYNRN |
| 52. | 52 | Serratia marcescens D-3 | MAESNAA\|QSAAI\|GAGTMGRG\|AYLFAQKG\|RTVLYNRN |
| 53. | 53 | Serratia marcescens 2880STDY5682957 | MAESNAA\|QSAAI\|GAGTMGRG\|AYLFAQKG\|RTVLYNRN |
| 54. | 54 | Serratia marcescens YDC563 | MAESNAA\|QSAAI\|GAGTMGRG\|AYLFAQKG\|RTVLYNRN |
| 55. | 55 | Serratia marcescens 2880STDY5683035 | MAESNAA\|QSAAI\|GAGTMGRG\|AYLFAQKG\|RTVLYNRN |
| 56. | 56 | Serratia marcescens 2880STDY5682930 | MAESNAA\|QSAAI\|GAGTMGRG\|AYLFAQKG\|RTVLYNRN |
| 57. | 57 | Serratia marcescens 790 | MAESNAA\|QSAAI\|GAGTMGRG\|AYLFAQKG\|RTVLYNRN |
| 58. | 58 | Serratia marcescens UMH5 | MAESNAA\|QSAAI\|GAGTMGRG\|AYLFAQKG\|RTVLYNRN |
| 59. | 59 | Serratia marcescens 2880STDY5682988 | MAESNAA\|QSAAI\|GAGTMGRG\|AYLFAQKG\|RTVLYNRN |
| 60. | 60 | Serratia marcescens 945154301 | MAESNAA\|QSAAI\|GAGTMGRG\|AYLFAQKG\|RTVLYNRN |
| 61. | 61 | Serratia marcescens at10508 | MAESNAA\|QSAAI\|GAGTMGRG\|AYLFAQKG\|RTVLYNRN |
| 62. | 62 | Serratia marcescens ML2637 | MAESNAA\|QSAAI\|GAGTMGRG\|AYLFAQKG\|RTVLYNRN |
| 63. | 63 | Serratia marcescens SM1978 | MAESNAA\|QSAAI\|GAGTMGRG\|AYLFAQKG\|RTVLYNRN |
| 64. | 64 | Serratia marcescens PWN146 | MAESNAA\|QSAAI\|GAGTMGRG\|AYLFAQKG\|RTVLYNRN |
| 65. | 65 | Serratia marcescens H1q | MAERNAA\|QSAAI\|GAGTMGRG\|AYLFAQKG\|RTVLYNRN |
| 66. | 66 | Serratia marcescens UMH6 | MAESNAA\|QSAAI\|GAGTMGRG\|AYLFAQKS\|RTVLYNRN |
| 67. | 67 | Serratia nematodiphila WCU338 | MAESNAA\|QSAAI\|GAGTMGRG\|AYLFAQKS\|RTVLYNRN |
| 68. | 68 | Serratia sp. OLEL1 | MAESNAA\|QSAAI\|GAGTMGRG\|AYLLAQKS\|RTVLYNRN |
| 69. | 69 | Serratia marcescens 7209 | MAESNAA\|QSAAI\|GAGTMGRG\|AYLFAQKS\|RTVLYNRN |
| 70. | 70 | Serratia marcescens sicaria (Ss1) | MAESNAA\|QSAAI\|GAGTMGRG\|AYLFAQKS\|RTVLYNRN |
| 71. | 71 | Serratia sp. OLFL2 | MAESNAA\|QSAAI\|GAGTMGRG\|AYLLAQKS\|RTVLYNRN |
| 72. | 72 | Serratia marcescens BIDMC 81 | MAESNAA\|QSAAI\|GAGTMGRG\|AYLLAQKS\|RTVLYNRN |
| 73. | 73 | Serratia marcescens BIDMC 50 | MAESNAA\|QSAAI\|GAGTMGRG\|AYLFAQKS\|RTVLYNRN |
| 74. | 74 | Serratia marcescens UMH7 | MAESNAA\|QSAAI\|GAGTMGRG\|AYLLAQKS\|RTVLYNRN |
| 75. | 75 | Serratia marcescens RSC-14 | MAESNAA\|QSAAI\|GAGTMGRG\|AYLLAQKS\|RTVLYNRN |
| 76. | 76 | Serratia marcescens SMO3 | MAERNAA\|QSAAI\|GAGTMGRG\|AYLFAQKG\|RTVLYNRN |
| 77. | 77 | Serratia marcescens 90-166 | MAESNAA\|QSAAI\|GAGTMGRG\|AYLFAQKG\|RTVLYNRN |
| 78. | 78 | Serratia marcescens UMH2 | MAESNAA\|QSAAI\|GAGTMGRG\|AYLLAQKS\|RTVLYNRN |
| 79. | 79 | Serratia plymuthica AS9 | MAENNSA\|RSAAV\|GAGTMGRG\|AYLLALNG\|RTVLYNRN |
| 80. | 80 | Serratia plymuthica tumat 205 | MAENNSA\|RSAAV\|GAGTMGRG\|AYLLALNG\|RTVLYNRN |
| 81. | 81 | Serratia plymuthica A30 | MAENNSA\|RSAAV\|GAGTMGRG\|AYLLALNG\|RTVLYNRN |
| 82. | 82 | Serratia plymuthica 4Rx13 | MAENNSA\|RSAAV\|GAGTMGRG\|AYLLALNG\|RTVLYNRN |
| 83. | 83 | Serratia plymuthica V4 | MAENNSA\|RSAAV\|GAGTMGRG\|AYLLALNG\|RTVLYNRN |
| 84. | 84 | Serratia plymuthica 3Rp8 | MAENNSA\|RSAAV\|GAGTMGRG\|AYLLALNG\|RTVLYNRN |
| 85. | 85 | Serratia proteamaculans MFPA44A14 | MAENNSA\|HSVAV\|GAGTMGRG\|AYLLAQNG\|RTLLYNRS |
| 86. | 86 | Serratia plymuthica A153 | MAENNSA\|RSAAV\|GAGTMGRG\|AYLLALNG\|RTVLYNRN |

[0102] In the present invention, impairing the function of pyruvate kinase or a phosphotransferase system enzyme means impairing the enzymatic activity of the enzyme. The method of impairment of the function is not limited to a particular method, but the function can be impaired, for example, by disrupting a gene that encodes the enzyme, such as via partial or complete deletion of the gene by mutagenesis with a chemical mutagen, ultraviolet irradiation, or the like, or by site-directed mutagenesis or the like, or via introduction of a frame-shift mutation or a stop codon into the nucleotide sequence of the gene. Alternatively, recombinant DNA technologies can be used to disrupt the gene by partial or complete deletion of the nucleotide sequence or by partial or complete substitution of the nucleotide sequence with another nucleotide sequence. Among those, the methods for partial or complete deletion of the nucleotide sequence are preferred.

[0103] Pyruvate kinase is classified as EC 2.7.1.40 and is an enzyme that catalyzes a reaction to dephosphorylate phosphoenolpyruvic acid (in this specification, also referred to as PEP) to pyruvic acid and ATP. Specific examples of pyruvate kinase include pykF (NCBI-Protein ID: NP 416191, SEQ ID NO: 182) and pykA (NCBI-Protein ID: NP 416368, SEQ ID NO: 183) from Escherichia coli strain K-12 substrain MG1655, and pykF (SEQ ID NO: 184) and pykA (SEQ ID NO: 185) from Serratia grimesii strain NBRC13537.

[0104] In cases where a microorganism used in the present invention has two or more genes that each encode a pyruvate kinase, as illustrated in the metabolic pathway shown in the scheme 2 below, it is desirable to impair the function of all the pyruvate kinases. Whether or not a polypeptide encoded by a certain gene of a microorganism used in the present invention is a pyruvate kinase may be determined by BLAST (Basic Local Alignment Search Tool) searching on a website, such as that of NCBI (National Center for Biotechnology Information) or KEGG (Kyoto Encyclopedia of Genes and Genomes).

[0105] In the genetically modified microorganism of the present invention, it is desirable to further impair the function of a phosphotransferase system enzyme. The phosphotransferase system enzyme is relevant to the phosphoenolpyruvate

[0106] (PEP)-dependent phosphotransferase system (PTS) (in this specification, also referred to as a PTS enzyme). PTS is a major mechanism for the uptake of carbohydrates such as hexose, hexitol, and disaccharide into a cell, as illustrated in the metabolic pathway shown in the scheme 2 below. PTS involves uptake of carbohydrates into a cell and simultaneous conversion of the carbohydrates to a phosphate ester, while converting a phosphate donor, PEP, to pyruvic acid. Therefore, the conversion reaction from PEP to pyruvic acid is inhibited in a mutant microorganism with a disrupted PTS enzyme gene.

[chemical structure]

[0107] PTS enzymes are composed of two common enzymes that exert their functions on any type of carbohydrate, phosphoenolpyruvate sugar phosphotransferase enzyme I and phospho carrier protein HPr, and membrane-bound sugar specific permeases (enzymes II) that are specific for particular carbohydrates. The enzymes II are further composed of sugar-specific components IIA, IIB, and IIC. The enzymes II exist as independent proteins or as fused domains in a single protein, and this depends on the organism which those enzymes are originated from. In microorganisms, phosphoenolpyruvate sugar phosphotransferase enzyme I is encoded by the pts gene, and phospho carrier protein 1-1Pr is encoded by the ptsH gene, and glucose-specific enzyme HA is encoded by the crr gene, and glucose-specific enzymes IIB and HC are encoded by the ptsG gene. The enzyme encoded by the ptsG gene is classified as EC 2.7.1.199 and is called protein-Npi-phosphohistidinc-D-glucose phosphotransferase.

[0108] In the present invention, one or more of the above PTS enzyme genes may be disrupted. Although any of the above PTS enzyme genes may be disrupted, it is desirable to impair an enzyme gene that is involved in glucose uptake, particularly the ptsG gene. Specific examples of the ptsG gene include ptsG from Escherichia coli strain K-12 substrain MG1655 (NCBI-Gene ID: 945651) andptsG from Serratia grimesii strain NBRC13537 (SEQ ID NO: 238).

[0109] Whether or not a polypeptide encoded by a certain gene of a microorganism used in the present invention is a protein-Npi-phosphohistidine-D-glucose phosphotransferase may be determined by BLAST searching on a website, such as that of NCBI or KEGG.

[0110] As described below, E. coli is a microorganism that has an ability to produce 3-hydroxyadipic acid and α-hydromuconic acid, and JP 2008-527991 A describes production of a genetically modified E. coli strain with defects in the pykF and pykA genes, which each encode a pyruvate kinase, and in the ptsG gene, which encodes a phosphotransferase system enzyme, wherein the yield of succinic acid is increased, and the yields of acetic acid and ethanol are decreased, by culturing the genetically modified strain under anaerobic conditions. In this respect, acetic acid and ethanol are compounds generated from the metabolism of acetyl-CoA, as illustrated in the metabolic pathway shown in the above scheme 2. That is, in JP 2008-527991 A. it is presumed that the defects of the ptsG, pykF, and pykA genes in E. coli resulted in a reduced supply of acetyl-CoA and in turn a lower yield of acetic acid and ethanol.

[0111] The 3-hydroxyadipic acid, α-hydromuconic acid, andor adipic acid produced by the method of the present invention are compounds generated through reactions in the metabolism of 3-oxoadipyl-CoA, which is produced from acetyl-CoA and succinyl-CoA by the reaction A, as described above. Accordingly, from the description in JP 2008-527991 A, it is expected that disruption of genes encoding pyruvate kinase and a phosphotransferase system enzyme also results in a decreased yields of 3-hydroxyadipic acid, α-hydromuconic acid, andor adipic acid due to the reduced supply of acetyl-CoA. However, in the present invention, disruption of genes encoding pyruvate kinase and a phosphotransferase system enzyme increases the yields of 3-hydroxyadipic acid, α-hydromuconic acid, andor adipic acid and also the yields of acetic acid and ethanol in a genetically modified microorganism expressing an enzyme that exhibits excellent activity in a reaction to reduce 3-oxoadipyl-CoA to 3-hydroxyadipyl-CoA, which is contrary to the above expectation.

[0112] In the present invention, examples of the microorganism that can be used as a host to obtain the genetically modified microorganism include microorganisms belonging to the genera Escherichia, Serratia, Hafnia, Pseudomonas, Corynebacterium, Bacillus. Streptomyces, Cupriavidus, Acinetobacter, Alcaligenes, Brevibacterium, Delftia, Aerobacter, Rhizobium, ThermoNfida, Clostridium, Schizosaccharomyces, Kluyveromyees, Pichia, and Candida. Among those, microorganisms belonging to the genera Escherichia, Serratia, Hafnia, and Pseudomonas are preferred.

[0113] The method of producing 3-hydroxyadipic acid, α-hydromuconic acid, andor adipic acid by using a genetically modified microorganism of the present invention will be described.

[0114] As a microorganism that has an ability to produce 3-hydroxyadipic acid, a microorganism that has an ability to generate 3-oxoadipyl-CoA and coenzyme A from acetyl-CoA and succinyl-CoA (the reaction A), and an ability to generate 3-hydroxyadipic acid from 3-hydroxyadipyl-CoA (the reaction E) is used. The microorganism with these production abilities can be used as a host microorganism to obtain a genetically modified microorganism according to the present invention with an ability to abundantly produce 3-hydroxyadipic acid.

[0115] Microorganisms that are speculated to originally have abilities to catalyze the above reactions A and E include microorganisms belonging to the following species:

[0116] species of the genus Escherichia, such as Escherichia fergusonii and Escherichia coli;

[0117] species of the genus Pseudomonas, such as Pseudomonas chlororaphis, Pseudomonas putida, Pseudomonas azotoformans, and Pseudomonas chlororaphis subsp. aureofaciens;

[0118] species of the genus Hafnia, such as Hafnia alvei;

[0119] species of the genus Corynebacterium, such as Corynebacterium acetoacidophilum, Corynebacterium acetoglulamicum, Corynebacterium ammoniagenes, and Corynebacterium glutamicum;

[0120] species of the genus Bacillus, such as Bacillus badius, Bacillus magaterium, and Bacillus roseus;

[0121] species of the genus Streptomyces, such as Streptomyces vinaceus, Streptomyces karnatakensis, and Streptomyces olivaceus;

[0122] species of the genus Cupriavidus, such as Cupriavidus metallidurans, Cupriavidus necator, and Cupriavidus oxalaticus;

[0123] species of the genus Acinetobacter, such as Acinetobacter baylyi and Acinetobacter radioresistens;

[0124] species of the genus Alcaligenes, such as Alcaligenes faecalis;

[0125] species of the genus Nocardioides, such as Nocardioides albus;

[0126] species of the genus Brevibacterium, such as Brevibacterium iodinum;

[0127] species of the genus Delfila, such as Delftia acidovorans;

[0128] species of the genus Shimwellia, such as Shimwellia blattae;

[0129] species of the genus Aerobacter, such as Aerobacter cloacae;

[0130] species of the genus Rhizobium, such as Rhizobium radiobacter;

[0131] species of the genus Serratia, such as Serratia grimesii, Serratia ficaria, Serratia fonticokt, Serratia odorfera, Serratia plymuthica, Serratia entomophila, and Serratia nematodiphila.

[0132] Even a microorganism that originally has no abilities to catalyze the reactions A andor E can also be used as the aforementioned host microorganism when an appropriate combination of nucleic acids that encode enzymes catalyzing the reactions A and E is introduced into the microorganism to impart those production abilities.

[0133] As a microorganism that has an ability to produce α-hydromuconic acid, a microorganism that has an ability to generate 3-oxoadipyl-CoA and coenzyme A from acetyl-CoA and succinyl-CoA (the reaction A), an ability to generate 2,3-dehydroadipyl-CoA from 3-hydroxyadipyl-CoA through dehydration (the reaction C), and an ability to generate α-hydromuconic acid from 2.3-dehydroadipyl-CoA (the reaction F) is used. The microorganism with these production abilities can be used as a host microorganism to obtain a genetically modified microorganism according to the present invention with an ability to abundantly produce α-hydromuconic acid.

[0134] Microorganisms that are speculated to originally have abilities to catalyze the above reactions A, C, and F include microorganisms belonging to the following species:

[0135] species of the genus Escherichia, such as Escherichia jergusonii and Escherichia coli;

[0136] species of the genus Pseudomonas, such as Pseudomonas fluorescens, Pseudomonas putida, Pseudomonas azotoformans, and Pseudomonas chlororaphis subsp. aureofaciens;

[0137] species of the genus Hafnia, such as Hafnia alvei;

[0138] species of the genus Bacillus, such as Bacillus badius;

[0139] species of the genus Cupriavidus, such as Cupriavidus metallidurans, Cupriavidus numazuensis, and Cupriavidus oxalaticus;

[0140] species of the genus Acinetobacter, such as Acinetobacter haylyi and Acinetobacter radioresistens;

[0141] species of the genus Alcaligenes, such as Alcaligenes faecalis;

[0142] species of the genus Delftia, such as Delftict acidovorans;

[0143] species of the genus Shimwellia, such as Shimwellia blattae;

[0144] species of the genus Serratia, such as Serratia grimesii, Serratia ficaria, Serratia fonticola, Serratia odorifera, Serratia plymuthica, Serratia entomophila, and Serratia nematodiphila.

[0145] Even a microorganism that originally has no abilities to catalyze the reactions A, C. andor F can also be used as the aforementioned host microorganism when an appropriate combination of nucleic acids that encode enzymes catalyzing the reactions A, C, and F is introduced into the microorganism to impart those production abilities.

[0146] As a microorganism that has an ability to produce adipic acid, a microorganism that has an ability to generate 3-oxoadipyl-CoA and coenzyme A from succinyl-CoA (the reaction A), an ability to generate 2,3-dehydroadipyl-CoA from 3-hydroxyadipyl-CoA through dehydration (the reaction C), an ability to reduce 2,3-dehydroadipyl-CoA to adipyl-CoA (the reaction D), and an ability to generate adipic acid from adipyl-CoA (the reaction G) is used. The microorganism with these production abilities can be used as a host microorganism to obtain a genetically modified microorganism with an ability to abundantly produce adipic acid.

[0147] Microorganisms that are speculated to originally have abilities to catalyze the above reactions A, C, D, and G include microorganisms of the genus Thermobifida, such as Thermobifida fusca.

[0148] Even a microorganism that originally has no abilities to catalyze the reactions A, C, D, and G can also be used as the aforementioned host microorganism when an appropriate combination of nucleic acids that encode enzymes catalyzing the reactions A, C, D, and G is introduced into the microorganism to impart those production abilities.

[0149] Specific examples of the enzymes that catalyze the reactions A and C to G are presented below.

[0150] As an enzyme that catalyzes the reaction A to generate 3-oxoadipyl-CoA, for example, an acyl transferase (P-ketothiolase) can be used. The acyl transferase is not limited to a particular number in the EC classification but is preferably an acyl transferase classified into EC 2.3.1.-, specifically including an enzyme classified as 3-oxoadipyl-CoA thiolase and classified into EC number 2.3.1.174, an enzyme classified as acetyl-CoA C-acetyltransferase and classified into EC number 2.3.1.9, and an enzyme classified as acetyl-CoA C-acyl transferase and classified into EC number 2.3.1.16. Among these, PaaJ from Escherichia coli strain MG1655 (NCBI-Protein ID: NP 415915), PcaF from Pseudomonas putida strain KT2440 (NCBI-Protein ID: NP 743536), and the like can be suitably used.

[0151] Whether or not the above acyl transferases can generate 3-oxoadipyl-CoA from succinyl-CoA and acetyl-CoA as substrates can be determined by measuring a decrease in NADH coupled with reduction of 3-oxoadipyl-CoA in a combination of the reaction catalyzed by purified acyl transferase to generate 3-oxoadipyl-CoA and a reaction catalyzed by purified 3-oxoadipyl-CoA reductase to reduce 3-oxoadipyl-CoA as a substrate. The specific measurement method is, for example, as follows.

[0152] Identification of acyl transferase activity: A PCR using the genomic DNA of a subject microorganism strain as a template is performed in accordance with routine procedures, to amplify a nucleic acid encoding an acyl transferase in the full-length form. The amplified fragment is inserted into the Suet site of pACYCDuet-1 (manufactured by Novagen), an expression vector for E. colt, in-frame with the histidine-tag sequence. The plasmid is introduced into E. coli BL21 (DE3), and expression of the enzyme is induced with isopropyl-P-thiogalactopyranoside (IPTG) in accordance with routine procedures and the enzyme is purified using the histidine tag from the culture fluid to obtain an acyl transferase solution. The acyl transferase activity can be determined by using the enzyme solution to prepare an enzymatic reaction solution with the following composition and measuring a decrease in absorbance at 340 ran coupled with oxidation of NADH at 30° C.

### (Enzymatic Reaction Solution)

[0153] 100 mM Tris-HCl (pH 8.0)

[0154] 10 mM MgCl₂

[0155] 0.1 mM succinyl-CoA

[0156] 0.2 mM acetyl-CoA

[0157] 0.2 mM NADH

[0158] 1 mM dithiothreitol

[0159] 10 μgmL 3-oxoadipyl-CoA reductase

[0160] 5 μgmL acyl transferase.

[0161] Whether or not an enzyme originally expressed in a host microorganism used in the present invention has acyl transferase activity can be determined by performing the above-described measurement using cell homogenate (cell free extract: CFE) instead of purified acyl transferase. The specific measurement method targeted to E. coli is, for example, as follows.

[0162] Preparation of CFE: A loopful of E. coli strain MG1655 to be subjected to the measurement of the activity is inoculated into 5 mL of a culture medium (culture medium composition: 10 gL tryptone, 5 gL yeast extract, 5 gL sodium chloride) adjusted to pH 7, and incubated at 30° C. with shaking for 18 hours. The obtained culture fluid is added to 5 mL of a culture medium (culture medium composition: 10 gL tryptone, 5 gL yeast extract, 5 gL sodium chloride, 2.5 mM ferulic acid, 2.5 mMp-coumaric acid, 2.5 mM benzoic acid, 2.5 mM cis,cis-muconic acid, 2.5 mM protocatechuic acid, 2.5 m1\4 catechol. 2.5 mM 30A, 2.5 mM 3-hydroxyadipic acid, 2.5 mM cc-hydromuconic acid. 2.5 mM adipic acid, 2.5 mM phenylethylamine) adjusted to pH 7. and incubated at 30° C. with shaking for 3 hours.

[0163] The obtained culture fluid is supplemented with 10 mL of 0.9% sodium chloride and then centrifuged to remove the supernatant from bacterial cells, and this operation is repeated three times in total to wash the bacterial cells. The washed bacterial cells are suspended in 1 mL of a Tris-HCl buffer composed of 100 mM Tris-HCl (pH 8.0) and 1 mM dithiothreitol, and glass beads (with a diameter of 0.1 mm) are added to the resulting suspension to disrupt the bacterial cells at 4° C. with an ultrasonic disruptor. The resulting bacterial homogenate is centrifuged to obtain the supernatant, and 0.5 mL of the supernatant is filtered through a UF membrane (Amicon Ultra-0.5mL 10K; manufactured by Merck Millipore) to remove the resulting filtrate, followed by application of 0.4 mL of the Tris-HCl buffer to the UF membrane, and this operation is repeated three times in total to remove low-molecular-weight impurities, and the resulting supernatant is then resuspended in the Tris-HCl buffer to a final volume of 0.1 mL, which is designated as CFE. Instead of purified enzyme, 0.05 mL of the CFE is added to a total of 0.1 mL of the enzymatic reaction solution to determine the enzymatic activity.

[0164] As an enzyme that catalyzes the reaction C to generate 2,3-dehydroadipyl-CoA, for example, an enoyl-CoA hydratase can be used. The enoyl-CoA hydratase is not limited by a particular number in the EC classification, and is preferably an enoyl-CoA hydratase classified into EC 4.2.1.-, specifically including an enzyme classified as enoyl-CoA hydratase or 2,3-dehydroadipyl-CoA hydratase and classified into EC 4.2.1.17. Among them, PaaF from Escherichia coli strain MG1655 (NCBI-ProteinlD: NP_415911), PaaF from Pseudomonas puhda strain KT2440 (NCBI-ProteinlD: NP_745427), and the like can be suitably used.

[0165] Since the reaction catalyzed by enoyl-CoA hydratase is generally reversible, whether or not an enoyl-CoA hydratase has an activity to catalyze a reaction that generates 2,3-dehydroadipyl-CoA from 3-hydroxyadipyl-CoA used as a substrate can be determined by detecting 3-hydroxyadipyl-CoA generated using purified enoyl-CoA hydratase with 2.3-dehydroadipyl-CoA used as a substrate thereof, which is prepared from α-hydromuconic acid through an enzymatic reaction. The specific measurement method is, for example, as follows.

[0166] The α-hydromuconic acid used in the above reaction can be prepared by a known method (for example, a method described in Reference Example 1 of WO 2016199858 A1).

[0167] Preparation of 2,3-dehydroadipyl-CoA solution: A PCR using the genomic DNA of Pseudomonas putida strain KT2440 as a template is performed in accordance with routine procedures, to amplify a nucleic acid encoding a CoA transferase (including peal and peal; NCBI-GenelDs: 1046613 and 1046612) in the full-length form. The amplified fragment is inserted into the Kpnl site of pRSF-⁻lb (manufactured by Novagen), an expression vector for E. coli, in-frame with the histidine-tag sequence. The plasmid is introduced into E. coli BL21 (DE3), and expression of the enzyme is induced with isopropyl-13-thiogalactopyranoside (IPTG) in accordance with routine procedures and the enzyme is purified using the histidine tag from the culture fluid to obtain a CoA transferase solution. The solution is used to prepare an enzymatic reaction solution for 2,3-dehydroadipyl-CoA preparation with the following composition, which is allowed to react at 30° C. for 10 minutes and then filtered through a UF membrane (Amicon Ultra-0.5mL 10K; manufactured by Merck Millipore) to remove the enzyme, and the obtained filtrate is designated as 2,3-dehydroadipyl-CoA solution.

### (Enzymatic Reaction Solution)

[0168] 100 mM Tris-IICl (pH 8.0)

[0169] 10 mM MgCI,

[0170] 0.4 mM succinyl-CoA

[0171] 2 mM ci-hydromuconic acid sodium salt

[0172] 20 μgmL CoA transferase.

[0173] Identification of enoyl-CoA hydratase activity: A PCR using the genomic DNA of a subject microorganism strain as a template is performed in accordance with routine procedures, to amplify a nucleic acid encoding an enoyl-CoA hydratase in the lull-length form. The amplified fragment is inserted into the Ndel site of pET-16b (manufactured by Novagen), an expression vector for E. coil, in-frame with the histidine-tag sequence. The plasmid is introduced into E. coli BL21 (DE3), and expression of the enzyme is induced with isopropyl-β-thiogalactopyranoside (IPTG) in accordance with routine procedures and the enzyme is purified using the histidine tag from the culture fluid to obtain an enoyl-CoA hydratase solution. The solution is used to prepare an enzymatic reaction solution with the following composition, which is allowed to react at 30° C. for 10 minutes and then filtered through a UF membrane (Amicon Ultra-0.5mL 10K; manufactured by Merck Millipore) to remove the enzyme. The enoyl-CoA hydratase activity can be confirmed by detecting 3-hydroxyadipyl-CoA in the resulting filtrate on high-performance liquid chromatograph-tandem mass spectrometer (LC-MSMS) (Agilent Technologies, Inc.).

### (Enzymatic Reaction Solution)

[0174] 100 mM Tris-HCl (pH 8.0)

[0175] 10 mM MgCl,

[0176] 300 μLmL 2,3-dehydroadipyl-CoA solution

[0177] 1 mM dithiothreitol

[0178] 20 ugmL enoyl-CoA hydratase.

[0179] Whether or not an enzyme originally expressed in a host microorganism used in the present invention has enoyl-CoA hydratase activity can be determined by adding 0.05 mL of the CFE, instead of purified enoyl-CoA hydratase, to a total of 0.1 mL of the enzymatic reaction solution and performing the above-described measurement. The specific CFE preparation method targeted to E. coli is as described for that used in determination of acyl transferase activity.

[0180] As an enzyme that catalyzes the reaction D to generate adipyl-CoA, for example, an enoyl-CoA reductase can be used. The enoyl-CoA reductase is not limited by a particular number in the EC classification, and is preferably an enoyl-CoA reductase classified into EC 1.3.-.-, specifically including an enzyme classified as trans-2-enoyl-CoA reductase and classified into EC 1.3.1.44, and an enzyme classified as acyl-CoA dehydrogenase and classified into EC 1.3.8.7. These specific examples are disclosed in, for example JP 2011-515111 A, J Appl Microbiol. 2015 Oct; 119 (4): 1057-63., and the like; among them, TER from Euglena gracilis strain Z (UniProtKB: Q5E⁻1590), Tfu 1647 from Thermobilida fitsca strain YX (NCBI-ProteinID: AAZ55682), DcaA from Acinetobacter baylyi strain ADPI (NCBI-ProteinID: AAL09094.1), and the like can be suitably used.

[0181] Whether or not an enoyl-CoA reductase has an activity to generate adipyl-CoA from 2,3-dehydroadipyl-CoA used as a substrate can be determined by measuring a decrease in NADH coupled with reduction of 2,3-dehydroadipyl-CoA in a reaction using purified enoyl-CoA reductase with 2,3-dehydroadipyl-CoA used as a substrate thereof, which is prepared from α-hydromuconic acid through another enzymatic reaction.

[0182] Preparation of α-hydromuconic acid and of 2,3-dehydroadipyl-CoA solution can be performed in the same manner as described above.

[0183] Identification of enoyl-CoA reductase activity: A PCR using the genomic DNA of a subject microorganism strain as a template is performed in accordance with routine procedures, to amplify a nucleic acid encoding an enoyl-CoA reductase in the full-length form. The amplified fragment is inserted into the NdeI site of pET-16b (manufactured by Novagen), an expression vector for E. coli, in-frame with the histidine-tag sequence. The plasmid is introduced into E. coli BL21 (DE3), and expression of the enzyme is induced with isopropyl-13-thiogalactopyranoside (IPTG) in accordance with routine procedures and the enzyme is purified using the histidine tag from the culture fluid to obtain an enoyl-CoA reductase solution. The enoyl-CoA reductase activity can be determined by using the enzyme solution to prepare an enzymatic reaction solution with the following composition and measuring a decrease in absorbance at 340 nm coupled with oxidation of NADH at 30° C.

### (Enzymatic Reaction Solution)

[0184] 100 mM Tris-HCl (pH 8.0)

[0185] 10 mM MgCl₂

[0186] 300 μLmL 2,3-dehydroadipyl-CoA solution

[0187] 0.2 mM NADH

[0188] 1 mM dithiothreitol

[0189] 20 μgmI. enoyl-CoA reductase.

[0190] Whether or not an enzyme originally expressed in a host microorganism used in the present invention has enoyl-CoA reductase activity can be determined by adding 0.05 mL of the CFE, instead of purified enoyl-CoA reductase, to a total of 0.1 mL of the enzymatic reaction solution and performing the above-described measurement. The specific CFE preparation method targeted to E. coli is as described for that used in determination of acyl transferase activity.

[0191] As an enzyme that catalyzes the reaction E to generate 3-hydroxyadipic acid, the reaction F to generate cc-hydromuconic acid, and the reaction G to generate adipic acid, for example, a CoA transferase or an acyl-CoA hydrolase, preferably a CoA transferase, can be used.

[0192] The CoA transferase is not limited by a particular number in the EC classification, and is preferably a CoA transferase classified into EC 2.8.3.-, specifically including an enzyme classified as CoA transferase or acyl-CoA transferase and classified into EC 2.8.3.6, and the like.

[0193] In the present invention, the term “CoA transferase” refers to an enzyme with activity (CoA transferase activity) to catalyze a reaction that generates carboxylic acid and succinyl-CoA from acyl-CoA and succinic acid used as substrates.

[0194] As an enzyme that catalyzes the reaction E to generate 3-hydroxyadipic acid and the reaction F to generate ct-hydromuconic acid, Peal and PcaJ from Pseudomonas putido strain KT2440 (NCBI-ProteinlDs: NP 746081 and NP 746082), and the like can be suitably used, among others.

[0195] As an enzyme that catalyzes the reaction G to generate adipic acid, Deal and DcaJ from Acinetobacter haylyi strain ADP1 (NCBI-ProteinlDs: CAG68538 and CAG68539), and the like can be suitably used.

[0196] Since the above enzymatic reactions are reversible, the CoA transferase activity against 3-hydroxyadipyl-CoA, 2,3-dehydroadipyl-CoA, or adipyl-CoA used as a substrate can be determined by detecting 3-hydroxyadipyl-CoA, 2,3-dehydroadipyl-CoA, or adipyl-CoA generated respectively using purified CoA transferase with 3-hydroxyadipic acid and succinyl-CoA, α-hydromuconic acid and succinyl-CoA, or adipic acid and succinyl-CoA used as substrates thereof. The specific measurement method is, for example, as follows.

[0197] Preparation of 3-hydroxyadipic acid: Preparation of 3-hydroxyadipic acid is performed according to the method described in Reference Example 1 of WO 2016199856 A1.

[0198] Identification of CoA transferase activity using 3-hydroxyadipic acid as a substrate: A PCR using the genomic DNA of a subject microorganism strain as a template is performed in accordance with routine procedures, to amplify a nucleic acid encoding a CoA transferase in the full-length form. The amplified fragment is inserted into the Kpnl site of pRSF-1 b (manufactured by Novagen), an expression vector for E. coli, in-frame with the histidine-tag sequence. The plasmid is introduced into E. coli BL21 (DE3), and expression of the enzyme is induced with isopropyl-1-thiogalactopyranoside (IPTG) in accordance with routine procedures and the enzyme is purified using the histidine tag from the culture fluid to obtain a CoA transferase solution. The solution is used to prepare an enzymatic reaction solution with the following composition, which is allowed to react at 30° C. for 10 minutes and then filtered through a UF membrane (Amicon Ultra-0.5mL 10K; manufactured by Merck Millipore) to remove the enzyme. The CoA transferase activity can be confirmed by detecting 3-hydroxyadipyl-CoA in the resulting filtrate on high-performance liquid chromatograph-tandem mass spectrometer (LC-MSMS) (Agilent Technologies, Inc.).

### (Enzymatic Reaction Solution)

[0199] 100 mM Tris-HCl (pII 8.0)

[0200] 10 mM MgCl,

[0201] 0.4 mM succinyl-CoA

[0202] 2 mM 3-hydroxyadipic acid sodium salt

[0203] 20 μgmL CoA transferase.

[0204] Preparation of α-hydromuconic acid: Preparation of α-hydromuconic acid is performed according to the method described in Reference Example 1 of WO 2016199858 A1.

[0205] Identification of CoA transferase activity using α-hydromuconic acid as a substrate: A PCR using the genomic DNA of a subject microorganism strain as a template is performed in accordance with routine procedures, to amplify a nucleic acid encoding a CoA transferase in the full-length lot III. The amplified fragment is inserted into the Kpnl site of pRSF-lb (manufactured by Novagen), an expression vector for E. coli, in-frame with the histidine-tag sequence. The plasmid is introduced into E. coli BL21 (DE3), and expression of the enzyme is induced with isopropyl-β-thiogalactopyranoside (IPTG) in accordance with routine procedures and the enzyme is purified using the histidine tag from the culture fluid to obtain a CoA transferase solution. The solution is used to prepare an enzymatic reaction solution with the following composition, which is allowed to react at 30° C. for 10 minutes and then filtered through a UF membrane (Amicon Ultra-0.5mL 10K; manufactured by Merck Millipore) to remove the enzyme. The CoA transferase activity can be confirmed by detecting 2,3-dehydroadipyl-CoA in the resulting filtrate on high-performance liquid chromatograph-tandem mass spectrometer (LC-MSMS) (Agilent Technologies, Inc.).

### (Enzymatic Reaction Solution)

[0206] 100 mM Tris-HCl (pH 8.0)

[0207] 10 niM MgCl₂

[0208] 0.4 mM succinyl-CoA

[0209] 2 mM α-hydromuconic acid sodium salt

[0210] 20 μgmL CoA transferase.

[0211] Identification of CoA transferase activity using adipic acid as a substrate: A PCR using the genomic DNA of a subject microorganism strain as a template is performed in accordance with routine procedures, to amplify a nucleic acid encoding a CoA transferase in the full-length form. The amplified fragment is inserted into the Kpnl site of pRSF-1 b (manufactured by Novagen), an expression vector for E. coli, in-frame with the histidine-tag sequence. The plasmid is introduced into E. coli BL21 (DE3), and expression of the enzyme is induced with isopropyl-β-thiogalactopyranoside (IPTG) in accordance with routine procedures and the enzyme is purified using the histidine tag from the culture fluid to obtain a CoA transferase solution. The solution is used to prepare an enzymatic reaction solution with the following composition, which is allowed to react at 30° C. for 10 minutes and then filtered through a UF membrane (Amicon Ultra-0.5mL 10K; manufactured by Merck Millipore) to remove the enzyme. The CoA transferase activity can be confirmed by detecting adipyl-CoA in the resulting filtrate on high-performance liquid chromatograph-tandem mass spectrometer (LC-MSMS) (Agilent Technologies, Inc.).

### (Enzymatic Reaction Solution)

[0212] 100 mM Tris-HCl (pH 8.0)

[0213] 10 mM MgCl₂

[0214] 0.4 mM succinyl-CoA

[0215] 2 mM adipic acid sodium salt

[0216] 20 μgmL CoA-transferase.

[0217] Whether or not an enzyme originally expressed in a host microorganism used in the present invention has CoA transferase activity can be determined by adding 0.05 mL of the CFE, instead of purified CoA transferase, to a total of 0.1 mL of the enzymatic reaction solution and performing the above-described measurement. The specific CFE preparation method targeted to E. coli is as described for that used in determination of acyl transferase activity.

[0218] Either the polypeptides described in (a) to (c) or the 3-hydroxybutyryl-CoA dehydrogenase in the present invention is characterized by having higher activity than 3-oxoadipyl-CoA reductases used in conventional techniques. In this respect, the phrase “higher activity” refers to production of 3-hydroxyadipic acid, α-hydromuconic acid, or adipic acid with a higher yield in a genetically modified microorganism expressing any one of the polypeptides than in a genetically modified microorganism expressing a conventional 3-oxoadipyl-CoA reductase when those microorganisms are derived from the same host microorganism species and are cultured under the same expression conditions in a culture medium containing a carbon source as a material for fermentation. In this respect, the yield of 3-hydroxyadipic acid is calculated according to the formula (2). The yield of u-hydromuconic acid or adipic acid is calculated according to the formula (2), where 3-hydroxyadipic acid is replaced by u-hydromuconic acid or adipic acid, respectively.

$$Formula ( 2 )$$

$$Yield ( \% ) = amount of generated 3 \text{-} hydroxyadipic acid ( mol ) \text{/} amount of consumed carbon source ( mol ) \times 100$$

[0219] The specific method to confirm the higher activity of either the polypeptides described in (a) to (c) or the 3-hydroxybutyryl-CoA dehydrogenase in the present invention compared to the activity of 3-oxoadipyl-CoA reductases used in conventional techniques is as follows. The pBBR1 MCS-2 vector, which is able to self-replicate in E. coli (ME Kovach, (1995), Gene 166: 175-176), is cleaved with Xhol to obtain pBBR1MCS-2Xhol. To integrate a constitutive expression promoter into the vector, an upstream 200-b region (SEQ ID NO: 186) of gapA (NCBI Gene ID: NC 000913.3) is amplified by PCR using the genomic DNA of Escherichia coli K-12 MG1655 as a template in accordance with routine procedures (for example, primers represented by SEQ ID NOs: 187 and 188 are used), and the obtained fragment and the pBBR1MCS-2Xhol are ligated together using the In-Fusion HD Cloning Kit (manufactured by Takara Bio Inc.) to obtain the plasmid pBBR1MCS-2::Pgap. The pBBR1MCS-2::Pgap is cleaved with Scol to obtain pBBR1MCS-2::PgapScaI. A nucleic acid encoding an acyl transferase in the full length form is amplified by PCR in accordance with routine procedures (for example, primers represented by SEQ ID NOs: 190 and 191 are used), and the obtained fragment and pBBR1MCS-2::PgapScaI are ligated together using the In-Fusion HD Cloning Kit to obtain the plasmid pBBR1MCS-2::AT. The pBBR⁻1MCS-2::AT is cleaved with Hpal to obtain pBBR1MCS-2::ATIIpal. A nucleic acid encoding a CoA transferase in the full length form is amplified by PCR in accordance with routine procedures (for example, primers represented by SEQ ID NOs: 194 and 195 are used), and the obtained fragment and pBBR1MCS-2::ATHpaI are ligated together using “the In-Fusion HD Cloning Kit” to obtain the plasmid pBBR1MCS-2::ATCT.

[0220] On the other hand, the pACYCDuet-1 expression vector (manufactured by Novagen), which is able to self-replicate in E. coli, is cleaved with BaivHl to obtain pACYCDuet-1BamHI. A nucleic acid encoding a polypeptide represented by any one of SEQ ID NOs: 1 to 86 or encoding a conventionally used 3-oxoadipyl-CoA reductase, is amplified by PCR in accordance with routine procedures (for example, primers represented by SEQ ID NOs: 196 and 197 are used), and the obtained fragment and pACYCDuet-1BamIII are ligated together using the In-Fusion HD Cloning Kit (manufactured by Takara Bio Inc.) to obtain a plasmid that expresses the polypeptide represented by any one of SEQ ID NOs: 1 to 86 or expresses the conventionally used 3-oxoadipyl-CoA reductase.

[0221] The obtained plasmid and the pBBR1MCS-2::ATCT are introduced into E. coli strain BL21 (DE3) by electroporation (NM Calvin. PC Hanawalt. J. Bacteriol, 170 (1988), pp. 2796-2801). A loopful of the strain after the introduction is inoculated into 5 mL of the culture medium I (10 gL Bacto Tryptone (manufactured by Difco Laboratories), 5 gL Bacto Yeast Extract (manufactured by Difco Laboratories), 5 gL sodium chloride, 25 ugmL kanamycin, and 15 μgmL chloramphenicol) adjusted to pH 7, and incubated at 30° C. with shaking at 120 min⁻¹ :for 18 hours. Subsequently, 0.25 mL of the culture fluid is added to 5 mL of the culture medium II (10 gL succinic acid, 10 gL glucose, 1 gl, ammonium sulfate, 50 mM potassium phosphate,0.025 gL magnesium sulfate,0.0625 mgL iron sulfate, 2.7 mgL manganese sulfate, 0.33 mgt, calcium chloride, 1.25 gL sodium chloride, 2.5 gL Bacto Tryptone. 1.25 gL Bacto Yeast Extract. 25 μgmL kanamycin, 15 μgmL chloramphenicol, and 0.01 mM IPTG) adjusted to plI 6.5. and incubated at 30° C. with shaking at 120 min^{-I} for 24 hours. The supernatant separated from bacterial cells by centrifugation of the culture fluid is processed by membrane treatment using Millex-GV (0.22 μm; PVDF; manufactured by Merck KGaA), and the resulting filtrate is analyzed to measure the 3-hydroxyadipic acid and carbon source concentrations in the culture supernatant. Quantitative analysis of 3-hydroxyadipic acid on LC-MSMS is performed under the following conditions.
[0222] HPLC: 1290 Infinity (manufactured by Agilent Technologies, Inc.)
[0223] Column: Synergi hydro-RP (manufactured by Phenomenex Inc.), length: 100 mm,
[0224] internal diameter: 3 mm, particle size: 2.5 um

[0225] Mobile phase: 0.1% aqueous formic acid solution methanol =7030
[0226] Flow rate: 0.3 mLmin
[0227] Column temperature: 40° C.
[0228] LC detector: DAD (210 nm)
[0229] MSMS: Triple-Quad LCMS (manufactured by Agilent Technologies, Inc.)
[0230] Ionization method: ESI in negative mode.

[0231] Quantitative analysis of carbon sources, such as sugars and succinic acid, on HPLC is performed under the following conditions.
[0232] HPLC: Shimazu Prominence (manufactured by Shimadzu Corporation)
[0233] Column: Shodex Sugar SH1011 (manufactured by Showa Denko K.K.), length: 300 mm, internal diameter: 8 mm, particle size: 6 μm
[0234] Mobile phase: 0.05M aqueous sulfuric acid solution
[0235] Flow rate: 0.6 mLmin
[0236] Column temperature: 65° C.
[0237] Detector: RI.

[0238] When a nucleic acid encoding any one selected from the group of the acyl transferase, the CoA transferase, the enoyl-CoA hydratase, and the enoyl-CoA reductase is introduced into a host microorganism in the present invention, the nucleic acid may be artificially synthesized based on the amino acid sequence information of the enzyme in a database, or isolated from the natural environment. In cases where the nucleic acid is artificially synthesized, the usage frequency of codons corresponding to each amino acid in the nucleic acid sequence may be changed depending on the host microorganism into which the nucleic acid is introduced.

[0239] In the present invention, the method of introducing a nucleic acid encoding any one selected from the group of the acyl transferase, the CoA transferase, the enoyl-CoA hydratase, and the enoyl-CoA reductase into the host microorganism method is not limited to a particular method; for example, a method in which the nucleic acid is integrated into an expression vector capable of autonomous replication in the host microorganism and then introduced into the host microorganism, a method in which the nucleic acid is integrated into the genome of the host microorganism, and the like can he used.

[0240] In cases where a nucleic acid encoding any one of the enzymes is isolated from the natural environment, the sources of the genes are not limited to particular organisms, and examples of the organisms include those of the genus Acinetobacter, such as Acinetobacter baylyi and Acinetobacter radioresistens; the genus Aerobacter, such as Aerobacter cloacae; the genus Alcaligenes, such as Alcaligenesfaecalis; the genus Bacillus, such as Bacillus badius, Bacillus magaterium, and Bacillus roseus; the genus Brevibacterium. such as Brevibacterium todinum; the genus Corynebacterium, such as Corynebacterium acetoacidophilum, Corynebacterium acetoglutamicum, Corynebacterium ammoniagenes, and Corynebacterium glutamicum; the genus Cupriavidus, such as Cupriavidus metallidurans, Cupriavidus necator, Cupriavidus numazuensis, and Cupriavidus oxalaticus; the genus Delflia, such as Delftia acidovorans; the genus Escherichia, such as Escherichia coli and Escherichia lergusonii; the genus Hafnia, such as Hafnia alvei; the genus Microbacterium, such as Microbacterium ammoniaphilum; the genus Nocardioides, such as Nocardioides alhus; the genus Planomicrohium, such as Planomicrobium okeanokoites; the genus Pseudomonas, such as Pseudomonas azotoformans, Pseudomonas chlororaphis, Pseudomonas fluorescens, Pseudomonas Pseudomonas putida, and Pseudomonas reptilivora; the genus Rhizobium, such as Rhizobium radiohacter; the genus Rhodosporidium, such as Rhodosporidium toruloides; the genus Saccharomyces, such as Saccharomyces cerevisiae; the genus Serratia, such as Serratia entoinophila, Serratialicaria, Serratia fonticola, Serratia grimesii, Serratia nematodiphila, Serratia odorilera, and Serratia plymuthica; the genus Shimwellia, such as Shimwellia blattae; the genus Streptomyces, such as Streptomyces vinaceus, Streptomyces karnatakensis, Streptomyces olivaceus, and Streptomyces vinaceus; the genus Yarrowia, such as Yarrowia lipolytica; the genus Yersinia, such as Yersinia ruckeri; the genus Euglena, such as Euglena gracilis; and the genus Thermobifida, such as Thermobifidalitsca. Preferably, the organisms are those of the genera Acinetobacter, Corynebacterium, Escherichia, Pseudomonas, Serratia, Euglena, and Thermobifida.

[0241] When a nucleic acid encoding a polypeptide expressed in the present invention is integrated into an expression vector or the genome of a host microorganism, the nucleic acid being integrated into the expression vector or the genome is preferably composed of a promoter, a ribosome-binding sequence, a nucleic acid encoding the polypeptide to be expressed, and a transcription termination sequence, and may additionally contain a gene that controls the activity of the promoter.

[0242] The promoter used in the present invention is not limited to a particular promoter, provided that the promoter drives expression of the enzyme in the host microorganism; examples of the promoter include gap promoter, trp promoter, lac promoter, toe promoter, and T7 promoter.

[0243] In cases where an expression vector is used in the present invention to introduce the nucleic acid or to enhance the expression of the polypeptide, the expression vector is not limited to a particular vector, provided that the vector is capable of autonomous replication in the microorganism; examples of the vector include pBBR1MCS vector, pBR322 vector, pMW vector, pET vector, pRSF vector, pCDF vector, pACYC vector, and derivatives of the above vectors.

[0244] In cases where a nucleic acid for genome integration is used in the present invention to introduce the nucleic acid or to enhance the expression of the polypeptide, the nucleic acid for genome integration is introduced by site-specific homologous recombination. The method for site-specific homologous recombination is not limited to a particular method, and examples of the method include a method in which λ Red recombinase and FLP recombinase are used (Proc Natl Acad Sci U.S.A. 2000 Jun. 6; 97 (12): 6640-6645.), and a method in which X Red recombinase and the soeB gene are used (Biosci Biotechnol Biochem. 2007 December; 71 (12):2905-11.).

[0245] The method of introducing the expression vector or the nucleic acid for genome integration is not limited to a particular method, provided that the method is for introduction of a nucleic acid into a microorganism; examples of the method include the calcium ion method (Journal of Molecular Biology, 53, 159 (1970)), and electroporation (N M Calvin, P C Hanawalt. J. Bacteriol, 170 (1988), pp. 2796-2801).

[0246] In the present invention, a genetically modified microorganism in which a nucleic acid encoding a 3-oxoadipyl-CoA reductase is introduced or expression of the corresponding polypeptide is enhanced is cultured in a culture medium, preferably a liquid culture medium, containing a carbon source as a material for fermentation which can be used by ordinary microorganisms. The culture medium used contains, in addition to the carbon source that can be used by the genetically modified microorganism, appropriate amounts of a nitrogen source, inorganic salts, and, if necessary, organic trace nutrients such as amino acids and vitamins. Any of natural and synthetic culture media can be used as long as the medium contains the above-described nutrients.

[0247] The material for fermentation is a material that can be metabolized by the genetically modified microorganism. The term “metabolize” refers to conversion of a chemical substance, which a microorganism has taken up from the extracellular environment or intracellularly generated from a different chemical substance, to another chemical substance through an enzymatic reaction. Sugars can be suitably used as the carbon source. Specific examples of the sugars include monosaccharides, such as glucose, sucrose, fructose, galactose, mannose, xylose, and arabinose; disaccharides and polysaccharides formed by linking these monosaccharides; and saccharified starch solution, molasses, and saccharified solution from cellulose-containing biomass, each containing any of those saccharides.

[0248] Other than the above sugars, succinic acid, a substrate of the CoA transferase, can also be added to the culture medium for efficient production of 3-hydroxyadipic acid, α-hydromuconic acid, andor adipic acid.

[0249] The above-listed carbon sources may be used individually or in combination. When a carbon source is added, the concentration of the carbon source in the culture medium is not particularly limited, and can be appropriately selected depending on the type of the carbon source; in the case of sugars, the concentration is preferably from 5 gL to 300 gL; in the case of succinic acid, the concentration is preferably from 0.1 gL to 100 gL.

[0250] As the nitrogen source used for culturing the genetically modified microorganism, for example, ammonia gas, aqueous ammonia, ammonium salts, urea, nitric acid salts, other supportively used organic nitrogen sources, such as oil cakes, soybean hydrolysate, casein degradation products, other amino acids; vitamins, corn steep liquor, yeast or yeast extract, meat extract, peptides such as peptone, and bacterial cells and hydrolysate of various fermentative bacteria can be used. The concentration of the nitrogen source in the culture medium is not particularly limited, and is preferably from 0.1 gL to 50 gL.

[0251] As the inorganic salts used for culturing the genetically modified microorganism, for example, phosphoric acid salts, magnesium salts, calcium salts, iron salts, and manganese salts can be appropriately added to the culture medium and used.

[0252] The culture conditions for the genetically modified microorganism to produce 3-hydroxyadipic acid, α-hydromuconic acid, andor adipic acid are set by appropriately adjusting or selecting, for example, the culture medium with the above composition, culture temperature, stirring speed, pH, aeration rate, and inoculation amount, depending on, for example, the species of the genetically modified microorganism and external conditions.

[0253] The pH range of the culture is not specifically limited, provided that the genetically modified microorganism can be grown in the pH range. However, the pH range is preferably from pH 5 to 8, more preferably from pH 5.5 to 6.8.

[0254] Although the range of aeration rates in the culture is not specifically limited, as long as 3-hydroxyadipic acid, α-hydromuconic acid, andor adipic acid can be produced under the aeration conditions. It is desired that oxygen remain in the gaseous phase andor liquid phase in a culture container for good growth of the mutant microorganism at least at the start of incubation.

[0255] In cases where foam is formed in a liquid culture, an antifoaming agent such as a mineral oil, silicone oil, or surfactant may be appropriately added to the culture medium.

[0256] After a recoverable amount of 3-hydroxyadipic acid, ct-hydromuconic acid, andor adipic acid is produced during culturing of the microorganism, the produced products can be recovered. The produced products can be recovered, for example isolated, according to a commonly used method, in which the culturing is stopped once a product of interest is accumulated to an appropriate level, and the fermentation product is collected from the culture. Specifically, the products can be isolated from the culture by separation of bacterial cells through, for example, centrifugation or filtration prior to, for example, column chromatography, ion exchange chromatography, activated charcoal treatment, crystallization, membrane separation, or distillation. More specifically, examples include, but are not limited to, a method in which an acidic component is added to salts of the products, and the resulting precipitate is collected; a method in which water is removed from the culture by concentration using, for example, a reverse osmosis membrane or an evaporator to increase the concentrations of the products and the products andor salts of the products are then crystallized and precipitated by cooling or adiabatic crystallization to recover the crystals of the products andor salts of the products by, for example, centrifugation or filtration; and a method in which an alcohol is added to the culture to produce esters of the products and the resulting esters of the products are subsequently collected by distillation and then hydrolyzed to recover the products. These recovery methods can be appropriately selected and optimized depending on, for example, physical properties of the products.

### EXAMPLES

[0257] The present invention will be specifically described below with reference to examples.

### Reference Example 1

[0258] Production of plasmids each expressing an enzyme catalyzing a reaction to generate 3-oxoadipyl-CoA and coenzyme A (the reaction A), an enzyme catalyzing a reaction to generate 3-hydroxyadipic acid from 3-hydroxyadipyl-CoA (the reaction E) and a reaction to generate α-hydromuconic acid from 2,3-dehydroadipyl-CoA (the reaction F), and a polypeptide represented by SEQ ID NO: 1, 2, 3, 4, 5, 6, or 7

[0259] The pBBR1MCS-2 vector, which is capable of autonomous replication in E. coil (ME Kovach, (1995). Gene 166: 175-176), was cleaved with Xhol to obtain pBBR1MCS-2Xhol. To integrate a constitutive expression promoter into the vector, primers (SEQ ID NOs: 187 and 188) were designed to amplify the upstream 200-b region (SEQ ID NO: 186) of gapzI (NCBI Gene ID: NC 000913.3) by PCR using the genomic DNA of Escherichia coil K-12 MG1655 as a template, and a PCR reaction was performed in accordance with routine procedures. The obtained fragment and pF3BR1MCS-2XhoI were ligated together using the In-Fusion HD Cloning Kit (manufactured by Takara Bio Inc.), and the resulting plasmid was introduced into E. coli strain DH5a. The nucleotide sequence on the plasmid isolated from the obtained recombinant E. coli strain was confirmed in accordance with routine procedures, and the plasmid was designated as pBBRIMCS-2::Pgap. Then, the pBBR1MCS-2::Pgap was cleaved with Seal to obtain pBBR1MCS-2::PgapScaI. For amplification of a gene encoding an enzyme catalyzing the reaction A, primers (SEQ ID NOs: 190 and 191) were designed to amplify the full length of the acyl transferase gene pcaF (NCBI Gene ID: 1041755, SEQ ID NO: 189) by PCR using the genomic DNA of Pseudomonas putida strain KT2440 as a template, and a PCR reaction was performed in accordance with routine procedures. The obtained fragment and the pBBR1MCS-2::PgapScaI were ligated together using the In-Fusion HD Cloning Kit, and the resulting plasmid was introduced into E. coli strain DH5a. The nucleotide sequence on the plasmid isolated from the obtained recombinant strain was confirmed in accordance with routine procedures, and the plasmid was designated as pBBR1MCS-2::AT. Then, the pBBR1MCS-2::AT was cleaved with Hpal to obtain pBBR1MCS-2::ATHpaI. For amplification of a gene encoding an enzyme catalyzing the reactions D and F, primers (SEQ ID NOs: 194 and 195) were designed to amplify a continuous sequence including the full lengths of genes together encoding a CoA transferase, peal and peal (NCBI Gene IDs: 1046613 and 1046612, SEQ ID NOs: 192 and 193) by PCR using the genomic DNA of Pseudomonas putida strain KT2440 as a template, and a PCR reaction was performed in accordance with routine procedures. The obtained fragment and the pBBR1MCS-2::ATHpal were ligated together using the In-Fusion HD Cloning Kit, and the resulting plasmid was introduced into E. coli strain DH5a. The nucleotide sequence on the plasmid isolated from the obtained recombinant strain was confirmed in accordance with routine procedures, and the plasmid was designated as pBBR1MCS-2::ATCT.

[0260] The pBBR1MCS-2::ATCT was cleaved with Seal to obtain pBBR1MCS-2::ATCTSca1. For amplification of a nucleic acid encoding a polypeptide represented by SEQ ID NO: 1, primers (SEQ ID NOs: 196 and 197) were designed to amplify the nucleic acid represented by SEQ ID NO: 87 through PCR using the genomic DNA of Serratia marcescens strain ATCC13880 as a template, and a PCR reaction was performed in accordance with routine procedures. For amplification of a nucleic acid encoding a polypeptide represented by SEQ ID NO: 2, primers (SEQ ID NOs: 198 and 199) were designed to amplify the nucleic acid represented by SEQ ID NO: 88 through PCR using the genomic DNA of Serratia nematodiphila strain DSM21420 as a template, and a PCR reaction was performed in accordance with routine procedures. For amplification of a nucleic acid encoding a polypeptide represented by SEQ ID NO: 3, primers (SEQ ID NOs: 200 and 201) were designed to amplify the nucleic acid represented by SEQ ID NO: 89 through PCR using the genomic DNA of Serratia plymuthica strain NBRC102599 as a template, and a PCR reaction was performed in accordance with routine procedures. For amplification of a nucleic acid encoding a polypeptide represented by SEQ ID NO: 4, primers (SEQ ID NOs: 202 and 203) were designed to amplify the nucleic acid represented by SEQ ID NO: 90 through PCR using the genomic DNA of Serratia proteamaculans strain 568 as a template, and a PCR reaction was performed in accordance with routine procedures. For amplification of a nucleic acid encoding a polypeptide represented by SEQ ID NO: 5, primers (SEQ ID NOs: 204 and 205) were designed to amplify the nucleic acid represented by SEQ ID NO: 91 through PCR using the genomic DNA of Serratia ureilytica strain Lr54 as a template, and a PCR reaction was performed in accordance with routine procedures. For amplification of a nucleic acid encoding a polypeptide represented by SEQ ID NO: 6, primers (SEQ ID NOs: 206 and 207) were designed to amplify the nucleic acid represented by SEQ ID NO: 92 through PCR using the genomic DNA of Serratia sp. strain BW106 as a template, and a PCR reaction was performed in accordance with routine procedures. For amplification of a nucleic acid encoding a polypeptide represented by SEQ ID NO: 7, primers (SEQ ID NOs: 208 and 209) were designed to amplify the nucleic acid represented by SEQ ID NO: 93 through PCR using the genomic DNA of Serratia liquefaciens strain FK01 as a template, and a PCR reaction was performed in accordance with routine procedures. Each of the obtained fragments and the pBBR1MCS-2::ATCTScaI were ligated together using the In-Fusion HD Cloning Kit (manufactured by Takara Bio Inc.), and each of the resulting plasmids was introduced into E. coli strain DH5a. The nucleotide sequence on the plasmid isolated from each of the obtained recombinant strains was confirmed in accordance with routine procedures.

[0261] The plasmid for expression of the polypeptide represented by SEQ ID NO: 1 was designated as “pBBR1MCS-2::ATCTOR1”; the plasmid for expression of the polypeptide represented by SEQ ID NO: 2 was designated as “pBBR1MCS-2::ATCTOR2”; the plasmid for expression of the polypeptide represented by SEQ ID NO: 3 was designated as “pBFIR1MCS-2::ATCTOR3”; the plasmid for expression of the polypeptide represented by SEQ ID NO: 4 was designated as “pBBR1N1CS-2::ATCTOR4”; the plasmid for expression of the polypeptide represented by SEQ ID NO: 5 was designated as “pBBR1MCS-2::ATCTOR5”; the plasmid for expression of the polypeptide represented by SEQ ID NO: 6 was designated as “pBBR1MCS-2::ATCTOR6”; and the plasmid for expression of the polypeptide represented by SEQ ID NO: 7 was designated as “pBBR1MCS-2::ATCTOR7”; and these plasmids are listed in Table 6.

TABLE 6

| | | | SEQ |
|---|---|---|---|
| | | | ID |
| Plasmid | Originating organism | Gene ID | NO: |
| pBBR1MCS- | Serratia marcescens ATCC | JMPQ01000047.1 | 87 |
| 2::ATCTOR1 | 13880 | | |
| pBBR1MCS- | Serratia nematodiphila | JPUX00000000.1 | 88 |
| 2::ATCTOR2 | DSM21420 | | |
| pBBR1MCS- | Serratia plymuthica | BCTU01000013.1 | 89 |
| 2::ATCTOR3 | NBRC102599 | | |
| pBBR1MCS- | Serratia proteamaculans | CP000826.1 | 90 |
| 2::ATCTOR4 | 568 | | |
| pBBR1MCS- | Serratia ureilytica Lr5/4 | JSFB01000001 | 91 |
| 2::ATCTOR5 | | | |
| pBBR1MCS- | Serratia sp. BW106 | MCGS01000002.1 | 92 |
| 2::ATCTOR6 | | | |
| pBBR1MCS- | Serratia liquefaciens FK01 | CP006252.1 | 93 |
| 2::ATCTOR7 | | | |

### Reference Example 2

[0262] Production of a plasmid for expression of an enzyme catalyzing a reaction to generate 2,3-dehydroadipyl-CoA from 3-hydroxyadipyl-CoA (the reaction C)

[0263] The pMW119 expression vector (manufactured by Nippon Gene Co., Ltd.), which is capable of autonomous replication in E. coli, was cleaved with Sad to obtain pMW119SacI. To integrate a constitutive expression promoter into the vector, primers (SEQ ID NOs: 210 and 211) were designed to amplify the upstream 200-b region (SEQ ID NO: 186) of gapA (NCBI Gene ID: NC 000913.3) by PCR using the genomic DNA of Escherichia coil K-12 MG1655 as a template, and a PCR reaction was performed in accordance with routine procedures. The obtained fragment and the pMW119SacI were ligated together using the In-Fusion HD Cloning Kit (manufactured by Takara Bio Inc.), and the resulting plasmid was introduced into E. coli strain DH5ct. The nucleotide sequence on the plasmid isolated from the obtained recombinant E. coli strain was confirmed in accordance with routine procedures, and the plasmid was designated as pMW1 19::Pgap. Then, the pMW1 19::Pgap was cleaved with Sphl to obtain pMW119::PgapSphl. For amplification of a gene encoding an enzyme catalyzing the reaction C, primers (SEQ ID NOs: 212 and 213) were designed to amplify the full length of the enoyl-CoA hydratase gene paaF (NCBI Gene ID: 1046932, SEQ ID NO: 176) by PCR using the genomic DNA of Pseudomonas puticia strain KT2440 as a template, and a PCR reaction was performed in accordance with routine procedures. The obtained fragment and the pMW119::PgapSphl were ligated together using the In-Fusion HD Cloning Kit (manufactured by Takara Bio Inc.), and the resulting plasmid was introduced into E. coli strain DH5a. The nucleotide sequence on the plasmid isolated from the obtained recombinant strain was confirmed in accordance with routine procedures. The obtained plasmid was designated as “pMW119::EH”.

### Reference Example 3

[0264] Production of plasmids each expressing an enzyme catalyzing a reaction to generate 3-oxoadipyl-CoA and coenzyme A from acetyl-CoA and succinyl-CoA (the reaction A), an enzyme catalyzing a reaction to generate adipic acid from adipyl-CoA (the reaction G), and a polypeptide represented by SEQ ID NO: 1, 2, 3, 4, 5, 6, or 7

[0265] For amplification of a gene encoding an enzyme catalyzing the reaction G, primers (SEQ ID NOs: 216 and 217) were designed to amplify a continuous sequence including the full lengths of genes together encoding a CoA transferase, dcaI and dcaf (NCBI Gene ID: CR543861.1, SEQ ID NOs: 214 and 215) by PCR using the genomic DNA of Acinetobacter baylyi strain ADPI as a template, and a PCR reaction was performed in accordance with routine procedures. The obtained fragment and each of the fragments obtained by cleaving the pBBR1MCS-2::ATCTORE pBBR1MCS-2::ATCTOR2, pBBR1MCS-2::ATCTOR3, pBBR1MCS-2::ATCTOR4, pBBR1MCS-2::ATCTOR5, pBBR1MCS-2::ATCTOR6, and pBBR1MCS-2::ATCTOR7 with Hpal, which were produced in Reference Example 1, were ligated together using the In-Fusion HD Cloning Kit, and each of the resulting plasmids was introduced into E. coli strain DH5u. The nucleotide sequences on the plasmids isolated from the obtained recombinant strains were confirmed in accordance with routine procedures, and the plasmids were designated as pBBR1MCS-2::ATCT2OR1, pBBIUMCS-2::ATCT2OR2, pBBR1MCS-2::ATCT2OR3, pBBR1MCS-2::ATCT2OR4, pBBR1MCS-2::ATCT2OR5, pBBR1MCS-2::ATCT2OR6, and pBBR1MCS-2::ATCT2OR7.

### Reference Example 4

[0266] Production of a plasmid for expression of enzymes catalyzing a reaction to generate 2,3-dehydroadipyl-CoA from 3-hydroxyadipyl-CoA (the reaction C) and a reaction to generate adipyl-CoA from 2,3-dehydroadipyl-CoA (the reaction D)

[0267] The pMW119::EH was cleaved with HindIll to obtain pMW119::EHHindIII. For amplification of a gene encoding an enzyme catalyzing the reaction D, primers (SEQ ID NOs: 219 and 220) were designed to amplify the full length of dcaA (NCBI-Protein ID: AAL09094.1, SEQ ID NO: 218) from Acinetobacter baylyi strain ADP1 by PCR, and a PCR reaction was performed in accordance with routine procedures. The obtained fragment and the pMW119::EHHindIII were ligated together using the In-Fusion HD Cloning Kit (manufactured by Takara Bio Inc.), and the resulting plasmid was introduced into E. coli strain DII5u. The nucleotide sequence on the plasmid isolated from the obtained recombinant strain was confirmed in accordance with routine procedures, and the plasmid was designated as pMW119::EHER.

### Example 1

[0268] Generation of a Mutant Microorganism of the Genus Serratia with Impaired Pyruvate Kinase Function

[0269] Genes encoding the pyruvate kinase of a microorganism of the genus Serratia, pykF and pykA, were disrupted to generate a mutant microorganism of the genus Serratia with impaired pyruvate kinase function.

[0270] The procedure for disrupting pykF and pykA followed the method described in Proc Natl Acad Sci U S A., 2000 Jun. 6, 97(12): 6640-6645.

Generation of a Mutant Microorganism Of The Genus Serratia Deficient in pykF

[0271] A PCR reaction was performed using pKD4 as a template and oligo DNAs represented by SEQ ID NOs: 221 and 222 as primers to obtain a PCR fragment of 1.6 kb in length for disruption of pykF. A FRT recombinase expression plasmid, pKD46, was introduced into Serratia grime,sli strain NBRC13537, and an ampicillin-resistant strain was obtained. The obtained strain was inoculated into 5 mL of LB medium containing 500 ugmL ampicillin and was cultured at 30° C. with shaking for 1 day. Subsequently, 0.5 mL of the culture fluid was inoculated into 50 mL of LB medium containing 500 ugmI, ampicillin and 50 mM arabinose and was cultured in rotation at 30° C. for 2 hours. The culture fluid was cooled on ice for 20 minutes, and the bacterial cells were then washed with 10% (ww) glycerol three times. The washed pellet was suspended in 100 ,AL of 10% (ww) glycerol and mixed with 5 μL of the PCR fragment, and the mixture was then cooled in an electroporation cuvette on ice for 10 minutes. Electroporation was performed using a Gene Pulser electroporator (manufactured by Bio-Rad Laboratories, Inc.; 3 kV, 200 D, 25 μF), and 1 mL of SOC medium was added to the electroporation cuvette immediately after the electroporation, and the bacterial cells in the cuvette were incubated at 30° C. with shaking for 2 hours. The total volume of the culture was applied to LB agar medium containing 25 ugmL kanamycin and was incubated at 30° C. for 1 day. Direct colony PCR was performed on the resulting kanamycin-resistant strains to confirm the deletion of the gene of interest and the insertion of a kanamycin resistance gene from the length of the amplified band. Oligo DNA primers represented by SEQ ID NOs: 223 and 225 were used.

[0272] Subsequently, one of the kanamycin-resistant strains was inoculated into 5 mL of LB medium and was cultured at 37° C. and passaged twice to segregate away the pKD46 and to obtain an ampicillin-sensitive strain. The plasmid pCP20 was introduced into the ampicillin-sensitive strain, and ampicillin-resistant strains were again obtained. After culturing the obtained strains at 40° C., colony direct PCR was performed on the resulting strains to confirm the deletion of the kanamycin resistance gene from the length of the amplified band. Oligo DNA primers represented by SEQ IT) NOs: 224 and 225 were used. Subsequently, one of the kanamycin-sensitive strains was inoculated into 5 mL of LB medium and was cultured at 37° C. and passaged twice to segregate away the pCP20. The obtained strain was designated as Serratia grimestiNBRC13537 zlpyk⁻F.

Generation of a Mutant Microorganism of the Genus Serratia Deficient in pykA

[0273] A PCR reaction was performed using pKD4 as a template and oligo DNAs represented by SEQ ID NOs: 226 and 227 as primers to obtain a PCR fragment of 1.6 kb in length for disruption of pykA.

[0274] By the same method as used for the generation of the pykA-deficient strain, pykA was disrupted in the Serratia grimesii NBRC13537 zipykE strain. After the plasmid pKD46 was introduced into the above strain, the PCR fragment used for disruption of pykA was introduced to the resulting strain. Direct colony PCR was performed on the resulting kanamycin-resistant strains to confirm the deletion of the gene of interest and the insertion of a kanamycin resistance gene from the length of the amplified band. Oligo DNA primers represented by SEQ ID NOs: 223 and 229 were used.

[0275] Subsequently, an ampicillin-sensitive strain was obtained by segregating away the pKD46. The plasmid pCP20 was introduced into the ampicillin-sensitive strain, and ampicillin-resistant strains were again obtained. Colony direct PCR was performed on the obtained strains to confirm the deletion of the kanamycin resistance gene from the length of the amplified band. Oligo DNA primers represented by SEQ ID NOs: 228 and 229 were used. The pCP20 was segregated away from one of the kanamycin-sensitive strains. The obtained strain was designated as SgΔPP.

### Example 2

[0276] Generation of mutant microorganisms of the genus Serratia with impaired pyruvate kinase function and carrying a plasmid expressing enzymes that catalyze the reactions A, B, E, and F

[0277] Each of the plasmids produced in Reference Example 1 was introduced into the SgΔPP produced in Example 1 to generate mutant microorganisms of the genus Serratia. Additionally, a mutant microorganism of the genus Serratia was generated as a control by introducing the pBBR1MCS-2 empty vector into the SgΔPP.

[0278] The SgΔPP was inoculated into 5 mL of LB medium and cultured at 30° C. with shaking for I day. Subsequently, 0.5 mL of the culture fluid was inoculated into 5 mL of LB medium and was cultured at 30° C. with shaking for 2 hours. The culture fluid was cooled on ice for 20 minutes, and the bacterial cells were then washed with 10% (ww) glycerol three times. The washed pellet was suspended in 100 μL of 10% (ww) glycerol and mixed with 1 uL of the pBBR1MCS-2 (control), pBBR1MCS-2::ATCTOR1, pBBRIMCS-2::ATCTOR2, pBBR1MCS-2::ATCTOR3, pBBRIMCS-2::ATCTOR4, pBBR1MCS-2::ATCTOR5, pBBR1MCS-2::ATCTOR6, or pBBR1MCS-2::ATCTOR7, and the mixture was then cooled in an electroporation cuvette on ice for 10 minutes. Electroporation was performed using a Gene Pulser electroporator (manufactured by Bio-Rad Laboratories, Inc.; 3 kV, 200 Ω, 25 μF), and 1 mL of SOC medium was added to the electroporation cuvette immediately after the electroporation, and the bacterial cells in the cuvette were incubated at 30° C. with shaking for 1 hour. Fifty μL of the culture was applied to LB agar medium containing 25 μgmL kanamycin and was incubated at 30° C. for 1 day. The obtained strains were designated as SgΔPPpBBR (negative control), SgΔPP3HA1, SgΔPP31IA2, SgΔPP3HA3, SgΔPP3HA4, SgΔPP3HA5, SgΔPP3HA6, and SgΔPP3HA7.

### Reference Example 5

[0279] Generation of Mutant Microorganisms of the Genus Serratia with Intact Pyruvate Kinase Function and Carrying a Plasmid Expressing Enzymes that Catalyze the Reactions A, B, E, and F

[0280] By the same method as in Example 2, the pBBR1MCS-2 (control), pBBR1MCS-2::ATCTOR1, pBBR1MCS-2::ATCTOR2, pBBR1MCS-2::ATCTOR3, pBBRl S-2::ATCTOR4,)1313R1MCS-2::AICTOR5, pBBR1MCS-2::ATCTOR6, or pBBRlMCS-2::ATCTOR7 was introduced into Serratia grimesii NBRC13537. The obtained strains were designated as SgpBBR (negative control), Sg3HA1, Sg31-1A2, Sg3HA3, Sg3HA4, Sg3HA5, Sg3HA6, and Sg3HA7.

### Example 3

[0281] Production test of 3-hydroxyadipic acid and u-hydromuconic acid using mutant microorganisms of the genus Serratia with impaired pyruvate kinase function

[0282] The production test of 3-hydroxyadipic acid and α-hydromuconic acid was conducted using the mutant microorganisms of the genus Serratia produced in Example 2.

[0283] A loopful of each mutant produced in Example 2 was inoculated into 5 mL (in a glass test tube of 18-mm diameter with aluminum cap) of the culture medium 1 (10 gL Bacto Tryptone (manufactured by Difco Laboratories), 5 gL Bacto Yeast Extract (manufactured by Difco Laboratories), 5 gL sodium chloride, 25 μgmL kanamycin) adjusted to pH 7 and was cultured at 30° C. with shaking at 120 min⁻¹ for 24 hours. Subsequently, 0.25 mL of the culture fluid was added to 5 mI, (in a glass test tube of 18-mm diameter with aluminum cap) of the culture medium II (50gL glucose. 1 gL ammonium sulfate, 50 mM potassium phosphate, 0.025 gL magnesium sulfate, 0.0625 mgL iron sulfate, 2.7 mgL manganese sulfate, 0.33 mgL calcium chloride, 1.25 gL sodium chloride, 2.5 gL Bacto Tryptone. 1.25 gL, Bacto Yeast Extract, 25 μgmL kanamycin) adjusted to p11 6.5 and was cultured at 30° C. with shaking at 120 min^{-I} for 24 hours.

### Quantitative Analysis of Substrate and Product

[0284] The supernatant separated from bacterial cells by centrifugation of each culture fluid was processed by membrane treatment using Millex-GV (0.22 μm; PVDF; manufactured by Merck KGaA), and the resulting filtrate was analyzed by the following methods to quantify the concentrations of 3-hydroxyadipic acid, α-hydromuconic acid, and other products accumulated in the culture supernatant and the concentration of sugars remaining unused in the culture medium. The yields of 3-hydroxyadipic acid and α-hydromuconic acid calculated using the above formula (2) from the measurement results are shown in Table 7. However, a concentration of not more than 0.1 mgL is considered to be below the detection limit in the quantitative LC-MSMS analysis and is hereinafter denoted in each table as N.D.

### Quantitative Analysis of 3-Hydroxyadipic Acid and α-Hydromuconic Acid by LC-MSMS

[0285] HPLC: 1290 Infinity (manufactured by Agilent Technologies, Inc.)
[0286] Column: Synergi hydro-RP (manufactured by Phenomenex Inc.), length: 100 mm, internal diameter: 3 mm, particle size: 2.5 μm
[0287] Mobile phase: 0.1% aqueous formic acid solution methanol =7030
[0288] Flow rate: 0.3 mLmin
[0289] Column temperature: 40° C.
[0290] LC detector: 1260DAD VL+(210 nm)
[0291] MSMS: Triple-Quad LCMS (manufactured by Agilent Technologies, Inc.)
[0292] Ionization method: ESI in negative mode.
   Quantitative analysis of organic acids by HPLC
[0293] HPLC:LC-10A (manufactured by Shimadzu Corporation)
[0294] Column: Shim-pack SPR-H (manufactured by Shimadzu GLC Ltd.), length: 250 mm, internal diameter: 7.8 mm, particle size: 8 μm
[0295] Shim-pack SCR-101H (manufactured by Shimadzu GLC Ltd.) length: 250 mm, internal diameter: 7.8 mm, particle size: 10 um
[0296] Mobile phase: 5 mM p-toluenesulfonic acid
[0297] Reaction solution: 5 mMp-toluenesulfonic acid, 0.1 mM EDTA, 20 mM Bis-Tris
[0298] Flow rate: 0.8 mLmin
[0299] Column temperature: 45° C.
[0300] Detector: CDD-l0Avp (manufactured by Shimadzu Corporation)

### Quantitative Analysis of Sugars and Alcohol by HPLC

[0301] HPLC: Shimazu Prominence (manufactured by Shimadzu Corporation)
[0302] Column: Shodex Sugar SII41011 (manufactured by Showa Denko K.K.), length: 300 mm, internal diameter: 8 mm, particle size: 6 μm
[0303] Mobile phase: 0.05M aqueous sulfuric acid solution
[0304] Flow rate: 0.6 mLmin
[0305] Column temperature: 65° C.
[0306] Detector: RID-10A (manufactured by Shimadzu Corporation).

### Comparative Example 1

[0307] Production test of 3-hydroxyadipic acid and α-hydromuconic acid using mutant microorganisms of the genus Serratia with intact pyruvate kinase function

[0308] The mutant microorganisms of the genus Serratia produced in Reference Example 5 were cultured in the same manner as in Example 3. The concentrations of 3-hydroxyadipic acid, α-hydromuconic acid, and other products accumulated in the culture supernatant and the concentration of sugars remaining unused in the culture medium were quantified. The yields of 3-hydroxyadipic acid and α-hydromuconic acid calculated using the above formula (2) from the measurement results are shown in Table 7.

[0309] By comparing the results of Comparative Example 1 and Example 3, it was found that the yields of 3-hydroxyadipic acid and ct-hydromuconic acid were increased by impairing the function of pyruvate kinase in the microorganism of the genus Serratia.

TABLE 7

| | | Yield of | Yield of |
|---|---|---|---|
| | Strain | 3HA (%) | HMA (%) |
| Example 3 | SgΔPP/ | 0.0362 | 0.0113 |
| | pBBR | | |
| | SgΔPP/3HA1 | 3.47 | 0.0782 |
| | SgΔPP/3HA2 | 5.78 | 0.0960 |
| | SgΔPP/3HA3 | 5.24 | 0.0846 |
| | SgΔPP/3HA4 | 5.10 | 0.0909 |
| | SgΔPP/3HA5 | 6.21 | 0.107 |
| | SgΔPP/3HA6 | 6.28 | 0.103 |
| | SgΔPP/3HA7 | 4.96 | 0.0638 |
| Comparative | Sg/ | N.D. | N.D. |
| Example 1 | pBBR | | |
| | Sg/3HA1 | 0.784 | 0.0293 |
| | Sg/3HA2 | 1.15 | 0.0470 |
| | Sg/3HA3 | 0.942 | 0.0461 |
| | Sg/3HA4 | 0.875 | 0.0418 |
| | Sg/3HA5 | 1.01 | 0.0529 |
| | Sg/3HA6 | 1.03 | 0.0366 |
| | Sg/3HA7 | 0.943 | 0.0237 |

### Example 4

[0310] Generation of an E. coli mutant with impaired pyruvate kinase function

[0311] Genes encoding the pyruvate kinase of E. coli, pykF and pykA, were disrupted to generate an E. coli mutant with impaired pyruvate kinase function. The procedure for disrupting pykF and pykA followed the method described in Proc Natl Acad Sci USA., 2000 Jun. 6, 97(12): 6640-6645.

Generation of an E. Coli Mutant Deficient in pykF

[0312] A PCR reaction was performed using pKD4 as a template and oligo DNAs represented by SEQ ID NOs: 230 and 231 as primers to obtain a PCR fragment of 1.6 kb in length for disruption of pykF.

[0313] A FRT recombinase expression plasmid, pKD46, was introduced into Escherichia coli strain MG1655, and an ampicillin-resistant strain was obtained. The obtained strain was inoculated into 5 mL of LB medium containing 100 μgmL ampicillin and cultured at 30° C. with shaking for 1 day. Subsequently, 0.5 mL of the culture fluid was inoculated into 50 mL of LB medium containing 100 ugmL ampicillin and 50 mM arabinose, and was cultured in rotation at 30° C. for 2 hours. The culture fluid was cooled on ice for 20 minutes, and the bacterial cells were then washed with 10% (ww) glycerol three times. The washed pellet was suspended in 100 μL of 10% (ww) glycerol and mixed with 5 μL of the PCR fragment, and the mixture was then cooled in an electroporation cuvette on ice for 10 minutes. Electroporation was performed using a Gene Pulser electroporator (manufactured by Bio-Rad Laboratories, Inc.; 3 kV, 200 Q, 25 uF), and 1 mL of SOC medium was added to the electroporation cuvette immediately after the electroporation, and the bacterial cells in the cuvette were incubated at 30° C. with shaking for 2 hours. The total volume of the culture was applied to LB agar medium containing 25 μgmL kanamycin and was incubated at 30° C. for 1 day. Direct colony PCR was performed on the resulting kanamycin-resistant strains to confinn the deletion of the gene of interest and the insertion of a kanamycin resistance gene from the length of the amplified band. Oligo DNA primers represented by SEQ ID NOs: 223 and 233 were used.

[0314] Subsequently, one of the kanamycin-resistant strains was inoculated into 5 mL of LB medium and was cultured at 37° C. and passaged twice to segregate away the pKD46 and to obtain an ampicillin-sensitive strain. The plasmid pCP20 was introduced into the ampicillin-sensitive strain, and ampicillin-resistant strains were again obtained. After culturing the obtained strains at 40° C., direct colony PCR was performed on the resulting strains to confirm the deletion of the kanamycin resistance gene from the length of the amplified band. Oligo DNA primers represented by SEQ ID NOs: 232 and 233 were used. Subsequently, one of the kanamycin-sensitive strains was inoculated into 5 mL of LB medium and was cultured at 37° C. and passaged twice to segregate away the pCP20. The obtained strain was designated as Escherichia coli MG1655 zlpykF.

Generation of an E. coli Mutant Deficient in pykA

[0315] A PCR reaction was performed using pKD4 as a template and oligo DNAs represented by SEQ ID NOs: 234 and 235 as primers to obtain a PCR fragment of 1.6 kb in length for disruption of pykA.

[0316] By the same method as used for the generation of the pykF-deficient strain, pykA was disrupted in the Escherichia coli MG1655 zlpykF strain. After the plasmid pKD46 was introduced into the above strain, the PCR fragment used for disruption of pykA was introduced to the resulting strain. Direct colony PCR was performed on the resulting kanamycin-resistant strains to confirm the deletion of the gene of interest and the insertion of a kanamycin resistance gene from the length of the amplified band. Oligo DNA primers represented by SEQ ID NOs: 223 and 224 were used.

[0317] Subsequently, an ampicillin-sensitive strain was obtained by segregating away the pKD46. The plasmid pCP20 was introduced into the ampicillin-sensitive strain, and ampicillin-resistant strains were again obtained. Direct colony PCR was performed on the obtained strains to confirm the deletion of the kanamycin resistance gene from the length of the amplified band. Oligo DNA primers represented by SEQ ID NOs: 236 and 237 were used. The pCP20 was segregated away from one of the kanamycin-sensitive strains. The obtained strain was designated as EcΔPP.

### Example 5

[0318] Generation of E. coli Mutants with Impaired Pyruvate Kinase Function and Carrying a Plasmid Expressing Enzymes that Catalyze the Reactions A, B, E, and F

[0319] Each of the plasmids produced in Reference Example 1 was introduced into the EcΔPP produced in Example 4 to generate E. coli mutants.

[0320] The EcΔPP was inoculated into 5 mL of LB medium and cultured at 30° C. with shaking for 1 day. Subsequently, 0.5 mL of the culture fluid was inoculated into 5 mL of LB medium and was cultured at 30° C. with shaking for 2 hours. The culture fluid was cooled on ice for 20 minutes, and the bacterial cells were then washed with 10% (ww) glycerol three times. The washed pellet was suspended in 100 μL of 10% (wvv) glycerol and mixed with 1 μL of the pBBR1MCS-2 (negative control), pBBR1MCS-2::ATCTOR1, pBBR1MCS-2::ATCTOR2, pBBR1MCS-2::ATCTOR3. pBBR1MCS-2::ATCTOR4, pBBR1MCS-2::ATCTOR5, pBBR1MCS-2::ATCTOR6, or pBBR1MCS-2::ATCTOR7, and the mixture was then cooled in an electroporation cuvette on ice for 10 minutes. Electroporation was performed using a Gene Pulser electroporator (manufactured by Bio-Rad Laboratories, Inc.; 3 kV, 200 Q, 25 μF). and 1 mL of SOC medium was added to the electroporation cuvette immediately after the electroporation, and the bacterial cells in the cuvette were incubated at 30° C. with shaking for 1 hour. Fifty μL of the culture was applied to LB agar medium containing 25 pgmL kanamycin and was incubated at 30° C. for 1 day. The obtained strains were designated as EcΔPPpBBR (negative control), EcΔPP3HA1, EcΔPP3HA2, EcΔPP31-1A3, EcΔPP3HA4, EcΔPP3HA5, EcΔPP3HA6, and EcΔPP3IIA7.

### Reference Example 6

[0321] Generation of E. Coli Mutants with Intact Pyruvate Kinase Function and Carrying a Plasmid Expressing Enzymes that Catalyze the Reactions A, B, E, and F

[0322] By the same method as in Example 5, the pBBR1MCS-2 (control), pBBR1MCS-2::ATCTOR1, pBBR1MCS-2::ATCTOR2, pBBR1MCS-2::ATCTOR3, pBBR1MCS-2::ATCTOR4, pBBR1MCS-2::ATCTORS, pBBR1MCS-2::ATCTOR6, or pBBR1MCS-2::ATCTOR7 was introduced into Escherichia coli MG1655. The obtained strains were designated as EepBBR (negative control), Ec3IIA1, Ec3HA2, Ec3HA2, Ec3HA4, Ec3HA5, Ec3HA6, and Ec3HA7.

### Example 6

[0323] Production Test of 3-Hydroxyadipic Acid and α-Hydromuconic Acid Using E. Coli Mutants with Impaired Pyruvate Kinase Function

[0324] The mutants produced in Example 5 were cultured in the same manner as in Example 3. The concentrations of 3-hydroxyadipic acid, α-hydromuconic acid, and other products accumulated in the culture supernatant and the concentration of sugars remaining unused in the culture medium were quantified. The yields of 3-hydroxyadipic acid and α-hydromuconic acid calculated using the above formula (2) from the measured values are shown in Table 8.

### Comparative Example 2

[0325] Production Ttest of 3-Hydroxyadipic Acid and α-Hydromuconic Acid Using E. Coli Mutants with Intact Pyruvate Kinase Function

[0326] The mutants produced in Reference Example 6 were cultured in the same manner as in Example 6. The concentrations of 3-hydroxyadipic acid, α-hydromuconic acid, and other products accumulated in the culture supernatant and the concentration of sugars remaining unused in the culture medium were quantified. The yields of 3-hydroxyadipic acid and ci-hydromuconic acid calculated using the above formula (2) from the measured values are shown in Table 8.

[0327] By comparing the results of Comparative Example 2 and Example 6. it was found that the yields of 3-hydroxyadipic acid and 0.-hydromuconic acid were increased by impairing the function of pyruvate kinase in E. coli.

TABLE 8

| | | Yield of | Yield of |
|---|---|---|---|
| | Strain | 3HA (%) | HMA (%) |
| Example 6 | EcΔPP/ | 0.0427 | 0.0132 |
| | pBBR | | |
| | EcΔPP/3HA1 | 2.54 | 0.0292 |
| | EcΔPP/3HA2 | 3.97 | 0.0333 |
| | EcΔPP/3HA3 | 3.64 | 0.0273 |
| | EcΔPP/3HA4 | 2.86 | 0.0257 |
| | EcΔPP/3HA5 | 3.67 | 0.0269 |
| | EcΔPP/3HA6 | 3.57 | 0.0348 |
| | EcΔPP/3HA7 | 3.13 | 0.0274 |
| Comparative | Ec/ | N.D. | N.D. |
| Example 2 | pBBR | | |
| | Ec/3HA1 | 1.48 | 0.0172 |
| | Ec/3HA2 | 2.59 | 0.0160 |
| | Ec/3HA3 | 2.64 | 0.0167 |
| | Ec/3HA4 | 1.82 | 0.0186 |
| | Ec/3HA5 | 2.47 | 0.0166 |
| | Ec/3HA6 | 2.66 | 0.0228 |
| | Ec/3HA7 | 1.78 | 0.0172 |

### Example 7

[0328] Generation of mutant microorganisms of the genus Serratia with impaired pyruvate kinase function and carrying plasmids expressing enzymes that catalyze the reactions A, B, C, E, and F

[0329] The plasmid pMW119::EH produced in Reference Example 2 was introduced into each mutant microorganism of the genus Serratia produced in Example 2 to generate mutant microorganisms of the genus Serratia . Additionally, a mutant microorganism of the genus Serratia was generated as a control by introducing the pMW119 empty vector into the SgΔPPpBBR produced in Example 2.

[0330] The SgΔPPpBBR, SgΔPP3HA1 SgΔPP3HA2, SgΔPP3HA3, SgΔPP3HA4, SgΔPP3HA5, SgΔPP3HA6, or SgΔPP3HA7 was inoculated into 5 mi. of LB medium containing 25 μgmL kanamycin and cultured at 30° C. with shaking for 1 day. Subsequently, 0.5 mL of the culture fluid was inoculated into 5 mf. of LB medium containing 25 μgmL kanamycin and was cultured at 30° C. with shaking for 2 hours. The culture fluid was cooled on ice for 20 minutes, and the bacterial cells were then washed with 10% (ww) glycerol three times. The washed pellet was suspended in 100 μL of 10% (ww) glycerol and mixed with 1 μL of the pBBR1MCS-2 (control) or pMW119::EH, and the mixture was then cooled in an electroporation cuvette on ice for 10 minutes. Electroporation was performed using a Gene Pulser electroporator (manufactured by Bio-Rad Laboratories, Inc.; 3 kV, 200 Ω, 25 μF), and 1 mL of SOC medium was added to the electroporation cuvette immediately after the electroporation, and the bacterial cells in the cuvette were incubated at 30° C. with shaking for 1 hour. Fitly of the culture was applied to LB agar medium containing 500 ugmL ampicillin and 25 μgmL kanamycin and was incubated at 30° C. for 1 day. The obtained strains were designated as SgΔPPpBBRpMW (negative control), SgΔPPIIMA1, SgΔPPHMA2, SgΔPPHMA3, SgΔPPHMA4, SgΔPPHMAS, SgΔPPHMA6, and S APPHMA7.

### Reference Example 7

[0331] Generation of mutant microorganisms of the genus Serratia with intact pyruvate kinase function and carrying plasmids expressing enzymes that catalyze the reactions A, B, C, E, and F

[0332] By the same method as in Example 7, the pMW119 (control) or pMW119::EH was introduced into SgpBBR, Sg3HA1, Sg3HA2, Sg3HA3, Sg3HA4, Sg3HA5, Sg311A6, and Sg3HA7. The obtained strains were designated as SgpBBRpMW (negative control), SgHMA1, SgHMA2, SgHMA3, SgHMA4, SgHMA5, SgHMA6, and SgHMA7.

### Example 8

[0333] Production test of α-hydromuconic acid using mutant microorganisms of the genus Semliki with impaired pyruvate kinase function

[0334] The mutants produced in Example 7 were cultured in the same manner as in Example 3, except that ampicillin was added to the culture medium to a final concentration of 500 μgmL. The concentrations of α-hydromuconic acid and other products accumulated in the culture supernatant and the concentration of sugars remaining unused in the culture medium were quantified. The yield of α-hydromuconic acid calculated using the above formula (2) from the measured values is shown in Table 9.

### Comparative Example 3

[0335] Production test of α-hydromuconic acid using mutant microorganisms of the genus Serratia with intact pyruvate kinase function

[0336] The mutants produced in Reference Example 7 were cultured in the same manner as in Example 8. The concentrations of α-hydromuconic acid and other products accumulated in the culture supernatant and the concentration of sugars remaining unused in the culture medium were quantified. The yield of α-hydromuconie acid calculated using the above formula (2) from the measured values is shown in Table 9.

[0337] By comparing the results of Comparative Example 3 and Example 8, it was found that the yield of a-hydromuconic acid was increased by impairing the function of pyruvate kinase in the microorganism of the genus Serratia.

TABLE 9

| | | Yield of |
|---|---|---|
| | Strain | HMA (%) |
| Example 8 | SgΔPP/ | 0.0119 |
| | pBBRpMW | |
| | SgΔPP/HMA1 | 0.156 |
| | SgΔPP/HMA2 | 0.179 |
| | SgΔPP/HMA3 | 0.153 |
| | SgΔPP/HMA4 | 0.118 |
| | SgΔPP/HMA5 | 0.217 |
| | SgΔPP/HMA6 | 0.241 |
| | SgΔPP/HMA7 | 0.140 |
| Comparative | Sg/ | N.D. |
| Example 3 | pBBRpMW | |
| | Sg/HMA1 | 0.0495 |
| | Sg/HMA2 | 0.0584 |
| | Sg/HMA3 | 0.0434 |
| | Sg/HMA4 | 0.0524 |
| | Sg/HMA5 | 0.0587 |
| | Sg/HMA6 | 0.0618 |
| | Sg/HMA7 | 0.0519 |

### Example 9

[0338] Generation of E. coli mutants with impaired pyruvate kinase function and carrying plasmids expressing enzymes that catalyze the reactions A, B, C, E, and F

[0339] The plasmid pMW119::EH produced in Reference Example 2 was introduced into each of the E. coli mutants produced in Example 5 to generate E. coli mutants. Additionally, an E. coli mutant was generated as a control by introducing the pMW119 empty vector into the EcΔPPpBBR produced in Example 5.

[0340] The EcΔPPpBBR. EcΔPP311⁻A1, EcΔPPRHA2, EcΔPP3HA3, EcΔPP3HA4. EcΔPP3HA5, EcΔPP311A6, or EcΔPP3HA7 was inoculated into 5 mL of LB medium containing 25 μgmL kanamycin and cultured at 30° C. with shaking for 1 day. Subsequently, 0.5 mL of the culture fluid was inoculated into 5 mL of LB medium containing 25 μgmL kanamycin and was cultured at 30° C. with shaking for 2 hours. The culture fluid was cooled on ice for 20 minutes, and the bacterial cells were then washed with 10% (ww) glycerol three times. The washed pellet was suspended in 100 μL of 10% (ww) glycerol and mixed with 1 uL of the pBBR1MCS-2 (control) or pMW1 19::EH, and the mixture was then cooled in an electroporation cuvette on ice for 10 minutes. Electroporation was performed using a Gene Pulser electroporator (manufactured by Bio-Rad Laboratories, Inc.; 3 kV, 200 Ω, 25 μF.), and 1 mL of SOC medium was added to the electroporation cuvette immediately after the electroporation, and the bacterial cells in the cuvette were incubated at 30° C. with shaking for 1 hour. Fifty uL of the culture was applied to LB agar medium containing 100 μgmL ampicillin and 25 μgmL kanamycin and was incubated at 30° C. for 1 day. The obtained strains were designated as EcΔPPpBBRpMW (negative control), EcΔPPHMA1, EcΔPPHMA2, EcΔPPHMA3, EcΔPPHMA4 EcΔPPHMAS, EcΔPPHMA6, and EcΔPPHMA7.

### Reference Example 8

[0341] Generation of E. coli mutants with intact pyruvate kinase function and carrying plasmids expressing enzymes that catalyze the reactions A, B, C, E, and F

[0342] By the same method as in Example 9, the pMW119 (control) or pMW119::EH was introduced into the EcpBBR, Ec3HA1, Ec3HA2, Ec31IA3, Ec3HA4, Ec3HA5, Ec3HA6, and Ec3HA7. The obtained strains were designated as EcpBBRpMW (negative control), EcHMA1, EcHMA2, EcIIMA3, EcHMA4, EcHMAS, EcIIMA6. and EcHMA7.

### Example 10

[0343] Production test of α-hydromuconic acid using E. coli mutants with impaired pyruvate kinase (Unction

[0344] The mutants produced in Reference Example 9 were cultured in the same manner as in Example 6, except that ampicillin was added to the culture medium to a concentration of 100 μgmL. The concentrations of α-hydromuconic acid and other products accumulated in the culture supernatant and the concentration of sugars remaining unused in the culture medium were quantified. The yield of α-hydromuconic acid calculated using the above formula (2) from the measured values is shown in Table 10.

### Comparative Example 4

[0345] Production test of α-hydromuconic acid using E. coli mutants with intact pyruvate kinase function

[0346] The mutants produced in Reference Example 8 were cultured in the same manner as in Example 10. The concentrations of α-hydromuconic acid and other products accumulated in the culture supernatant and the concentration of sugars remaining unused in the culture medium were quantified. The yield of α-hydromuconic acid calculated using the above formula (2) from the measured values is shown in Table 10.

[0347] By comparing the results of Comparative Example 4 and Example 10, it was found that the yield of α-hydromuconic acid was increased by impairing the function of pyruvate kinase in E. coli.

TABLE 10

| | | Yield of |
|---|---|---|
| | Strain | HMA (%) |
| Example 10 | EcΔPP/ | 0.0167 |
| | pBBRpMW | |
| | EcΔPP/HMA1 | 0.0511 |
| | EcΔPP/HMA2 | 0.0818 |
| | EcΔPP/HMA3 | 0.0717 |
| | EcΔPP/HMA4 | 0.0688 |
| | EcΔPP/HMA5 | 0.0765 |
| | EcΔPP/HMA6 | 0.0761 |
| | EcΔPP/HMA7 | 0.0599 |
| Comparative | Ec/ | N.D. |
| Example 4 | pBBRpMW | |
| | Ec/HMA1 | 0.0362 |
| | Ec/HMA2 | 0.0636 |
| | Ec/HMA3 | 0.0569 |
| | Ec/HMA4 | 0.0624 |
| | Ec/HMA5 | 0.0621 |
| | Ec/HMA6 | 0.0640 |
| | Ec/HMA7 | 0.0491 |

### Example 11

[0348] Generation of mutant microorganisms of the genus Serratia with impaired pyruvate kinase function and carrying plasmids expressing enzymes that catalyze the reactions A, B. C, D, and G

[0349] By the same method as in Example 2, the pBBR1MCS-2::ATCT2OR1, pBBR1MCS-2::ATCT2OR2, pBBR1MCS-2::ATCT2OR3, pBBR1.MCS-2::ATCT2OR4, pBBR1MCS-2::ATCT2OR5, pBBR1MCS-2::ATCT2OR6, or pBBR1MCS-2::ATCT2OR7 produced in Reference Example 3 was introduced into the SgΔPP. By the same method as in Example 7, the plasmid pMW119::EIIER produced in Reference Example 4 was introduced into each of the obtained mutants to generate mutant microorganisms of the genus Serratia . The obtained strains were designated as SgΔPPADA1, SgΔPPADA2, SgΔPPADA3, SgΔPPADA4, SgΔPPADAS, SgΔPPADA6, and SgΔPPADA7.

### Reference Example 9

[0350] Generation of mutant microorganisms of the genus Serratia with intact pyruvate kinase function and carrying plasmids expressing enzymes that catalyze the reactions A, B, C, D, and G

[0351] By the same method as in Example 11, the pBBR1MCS-2::ATCT2OR1, pBBR1MCS-2::ATCT2OR2, pBBR1MCS-2::ATCT2OR3, pBBR1MCS-2::ATCT2OR4, pBBR1MCS-2::ATCT2OR5, pBBR1MCS-2::ATCT2OR6, or pBBR1MCS-2::ATCT2OR7 produced in Reference Example 3 was introduced into Serratia grimesii NBRC13537. By the same method as in Example 7, the plasmid pMW119::EHER produced in Reference Example 4 was introduced into each of the obtained mutants to generate mutant microorganisms of the genus Serratia . The obtained strains were designated as SgADA1, SgADA2, SgADA3, SgADA4, SgADAS, SgADA6, and SgADA7.

### Example 12

[0352] Production test of adipic acid using mutant microorganisms of the genus Serratia with impaired pyruvate kinase function

[0353] The mutants produced in Example 11 and the SgΔPPpBBRpMW (negative control) were cultured in the same manner as in Example 8. The concentrations of adipic acid and other products accumulated in the culture supernatant and the concentration of sugars remaining unused in the culture medium were quantified. The quantification of adipic acid was performed using LC-MSMS under the same conditions for the quantification of 3-hydroxyadipic acid and α-hydromuconic acid. The yield of adipic acid calculated using the above formula (2) from the measured values is shown in Table 11.

### Comparative Example 5

[0354] Production test of adipic acid using mutant microorganisms of the genus Serratia with intact pyruvate kinase function

[0355] The mutants produced in Reference Example 9 and the SgpBBRpMW were cultured in the same manner as in Example 8. The concentrations of adipic acid and other products accumulated in the culture supernatant and the concentration of sugars remaining unused in the culture medium were quantified. The yield of adipic acid calculated using the above formula (2) from the measured values is shown in Table 11.

[0356] By comparing the results of Comparative Example 5 and Example 12, it was found that the yield of adipic acid was increased by impairing the function of pyruvate kinase in the microorganism of the genus Serratia .

TABLE 11

| | | Yield of |
|---|---|---|
| | Strain | ADA (%) |
| Example 12 | SgΔPP/ | N.D. |
| | pBBRpMW | |
| | SgΔPP/ADA1 | 0.0783 |
| | SgΔPP/ADA2 | 0.110 |
| | SgΔPP/ADA3 | 0.0861 |
| | SgΔPP/ADA4 | 0.116 |
| | SgΔPP/ADA5 | 0.108 |
| | SgΔPP/ADA6 | 0.136 |
| | SgΔPP/ADA7 | 0.0958 |
| Comparative | Sg/ | N.D. |
| Example 5 | pBBRpMW | |
| | Sg/ADA1 | 0.0244 |
| | Sg/ADA2 | 0.0325 |
| | Sg/ADA3 | 0.0254 |
| | Sg/ADA4 | 0.0246 |
| | Sg/ADA5 | 0.0314 |
| | Sg/ADA6 | 0.0264 |
| | Sg/ADA7 | 0.0289 |

### Example 13

[0357] Generation of E. coli mutants with impaired pyruvate kinase function and carrying plasmids expressing enzymes that catalyze the reactions A, B, C, D, and G

[0358] By the same method as in Example 5, the PBBR1MCS-2::ATCT2OR1, pBBR1MCS-2::ATCT2OR2, pBBR1MCS-2::ATCT2OR3, pBBR1MCS-2::ATCT2OR4, pBBR1MCS-2::ATCT2OR5, pBBR1MCS-2::ATCT2OR6, or pBBR1MCS-2::ATCT2OR7 produced in Reference Example 3 was introduced into the EeAPP. By the same method as in Example 9, the plasmid pMW119::EHER produced in Reference Example 4 was introduced into each of the obtained mutants to generate E. coli mutants. The obtained strains were designated as EcΔPPADA1, EcΔPPADA2, EcΔPPADA3, EcΔPPADA4, EcΔPPADAS, EcΔPPADA6, and EcΔPPADA7.

### Reference Example 10

[0359] Generation of E. coli mutants with intact pyruvate kinase function and carrying plasmids expressing enzymes that catalyze the reactions A, B, C, D, and G

[0360] By the same method as in Example 13, the pBBR1MCS-2::ATCT2OR1, pBBR1MCS-2::ATCT2OR2, pBBR1MCS-2::ATCT2OR3, pBBR1MCS-2::ATCT2OR4, pBBR1MCS-2::ATCT2OR5, pBBR1MCS-2::ATCT2OR6, or pBBR1MCS-2::ATCT2OR7 produced in Reference Example 3 was introduced into Escherichia coli MG1655. By the same method as in Example 9, the plasmid pMW119::EHER produced in Reference Example 4 was introduced into each of the obtained mutants to generate E. coli mutants. The obtained strains were designated as EcADA1, EcADA2, EcADA3, EcADA4, EcADAS, EcADA6, and EcADA7.

### Example 14

[0361] Production test of adipic acid using E. coli mutants with impaired pyruvate kinase function

[0362] The mutants produced in Example 13 and the EcΔPPpBBRpMW were cultured in the same manner as in Example 10. The concentrations of adipic acid and other products accumulated in the culture supernatant and the concentration of sugars remaining unused in the culture medium were quantified. The quantification of adipic acid was performed using LC-MSMS under the same conditions for the quantification of 3-hydroxyadipic acid and α-hydromuconic acid. The yield of adipic acid calculated using the above formula (2) from the measured values is shown in Table 12.

### Comparative Example 6

[0363] Production test of adipic acid using E. coli mutants with intact pyruvate kinase function

[0364] The mutants produced in Reference Example 10 and the EcpBBRpMW were cultured in the same manner as in Example 10. The concentrations of adipic acid and other products accumulated in the culture supernatant and the concentration of sugars remaining unused in the culture medium were quantified. The yield of adipic acid calculated using the above formula (2) from the measured values is shown in Table 12.

[0365] By comparing the results of Comparative Example 6 and Example 14, it was found that the yield of adipic acid was increased by impairing the function of pyruvate kinase in E. coli.

TABLE 12

| | | Yield of |
|---|---|---|
| | Strain | ADA (%) |
| Example 14 | EcΔPP/ | N.D. |
| | pBBRpMW | |
| | EcΔPP/ADA1 | 0.0213 |
| | EcΔPP/ADA2 | 0.0338 |
| | EcΔPP/ADA3 | 0.0293 |
| | EcΔPP/ADA4 | 0.0315 |
| | EcΔPP/ADA5 | 0.0382 |
| | EcΔPP/ADA6 | 0.0407 |
| | EcΔPP/ADA7 | 0.0235 |
| Comparative | Ec/ | N.D. |
| Example 6 | pBBRpMW | |
| | Ec/ADA1 | 0.0148 |
| | Ec/ADA2 | 0.0153 |
| | Ec/ADA3 | 0.0107 |
| | Ec/ADA4 | 0.0192 |
| | Ec/ADA5 | 0.0139 |
| | Ec/ADA6 | 0.0147 |
| | Ec/ADA7 | 0.0167 |

### Example 15

[0366] Production test 2 of 3-hydroxyadipic acid and α-hydromuconic acid using mutant microorganisms of the genus Serratia with impaired pyruvate kinase function

[0367] The production test of 3-hydroxyadipic acid and a.-hydromuconic acid was conducted using the mutant microorganisms of the genus Serratia produced in Example 2 under anaerobic conditions.

[0368] The mutant microorganisms of the genus Serratia produced in Example 2 were cultured in the same manner as in Example 3, except that the mutant microorganisms were cultured statically using the culture medium II. The concentrations of 3-hydroxyadipic acid, α-hydromuconic acid, and other products accumulated in the culture supernatant and the concentration of sugars remaining unused in the culture medium were quantified. The yields of 3-hydroxyadipic acid and α-hydromuconic acid calculated using the above formula (2) from the measured values are shown in Table 13.

### Comparative Example 7

[0369] Production test 2 of 3-hydroxyadipic acid and α-hydromuconic acid using mutant microorganisms of the genus Serratia with intact pyruvate kinase function

[0370] The mutants produced in Reference Example 5 were cultured in the same manner as in Example 15. The concentrations of 3-hydroxyadipic acid, α-hydromuconic acid, and other products accumulated in the culture supernatant and the concentration of sugars remaining unused in the culture medium were quantified.

[0371] The yields of 3-hydroxyadipic acid and α-hydromuconic acid calculated using the above formula (2) from the measured values are shown in Table 13.

[0372] By comparing the results of Comparative Example 7 and Example 15, it was found that the yields of 3-hydroxyadipic acid and α-hydromuconic acid were increased even under anaerobic conditions by impairing the function of pyruvate kinase in the microorganism of the genus Serratia .

TABLE 13

| | | Yield of | Yield of |
|---|---|---|---|
| | Strain | 3HA (%) | HMA (%) |
| Example 15 | SgΔPP/ | 0.0485 | 0.0224 |
| | pBBR | | |
| | SgΔPP/3HA1 | 4.84 | 0.159 |
| | SgΔPP/3HA2 | 6.07 | 0.171 |
| | SgΔPP/3HA3 | 5.99 | 0.143 |
| | SgΔPP/3HA4 | 5.30 | 0.195 |
| | SgΔPP/3HA5 | 5.84 | 0.180 |
| | SgΔPP/3HA6 | 6.02 | 0.202 |
| | SgΔPP/3HA7 | 5.98 | 0.160 |
| Comparative | Sg/ | N.D. | N.D. |
| Example 7 | pBBR | | |
| | Sg/3HA1 | 1.68 | 0.0482 |
| | Sg/3HA2 | 2.46 | 0.0577 |
| | Sg/3HA3 | 1.94 | 0.0471 |
| | Sg/3HA4 | 1.99 | 0.0527 |
| | Sg/3HA5 | 2.29 | 0.0523 |
| | Sg/3HA6 | 2.95 | 0.0627 |
| | Sg/3HA7 | 1.66 | 0.0595 |

### Example 16

[0373] Production test 2 of 3-hydroxyadipic acid and u-hydromuconic acid using E. coli mutants with impaired pyruvate kinase function

[0374] The production test of 3-hydroxyadipic acid and u-hydromuconic acid was conducted under anaerobic conditions using the K coli mutants produced in Example 5.

[0375] The E. coli mutants produced in Example 5 were cultured in the same manner as in Example 6, except that the mutants were cultured statically using, the culture medium II. The concentrations of 3-hydroxyadipic acid, α-hydromuconic acid, and other products accumulated in the culture supernatant and the concentration of sugars remaining unused in the culture medium were quantified. The yields of 3-hydroxyadipic acid and α-hydromuconic acid calculated using the above formula (2) from the measured values are shown in Table 14.

### Comparative Example 8

[0376] Production test 2 of 3-hydroxyadipic acid and α-hydromuconic acid using E. coli mutants with intact pyruvate kinase function

[0377] The mutants produced in Reference Example 6 were cultured in the same manner as in Example 16. The concentrations of 3-hydroxyadipic acid, α-hydromuconic acid, and other products accumulated in the culture supernatant and the concentration of sugars remaining unused in the culture medium were quantified. The yields of 3-hydroxyadipic acid and α-hydromuconic acid calculated using the above formula (2) from the measured values are shown in Table 14.

[0378] By comparing the results of Comparative Example 8 and Example 16, it was found that the yields of 3-hydroxyadipic acid and α-hydromuconic acid were increased even under anaerobic conditions by impairing the function of pyruvate kinase in E. coli.

TABLE 14

| | | Yield of | Yield of |
|---|---|---|---|
| | Strain | 3HA (%) | HMA (%) |
| Example 16 | EcΔPP/ | 0.0669 | 0.0113 |
| | pBBR | | |
| | EcΔPP/3HA1 | 13.2 | 0.0213 |
| | EcΔPP/3HA2 | 14.9 | 0.0277 |
| | EcΔPP/3HA3 | 13.9 | 0.0268 |
| | EcΔPP/3HA4 | 14.1 | 0.0224 |
| | EcΔPP/3HA5 | 14.3 | 0.0259 |
| | EcΔPP/3HA6 | 14.7 | 0.0226 |
| | EcΔPP/3HA7 | 13.2 | 0.0213 |
| Comparative | Ec/ | N.D. | N.D. |
| Example 8 | pBBR | | |
| | Ec/3HA1 | 1.32 | 0.0171 |
| | Ec/3HA2 | 2.00 | 0.0154 |
| | Ec/3HA3 | 1.82 | 0.0130 |
| | Ec/3HA4 | 1.47 | 0.0136 |
| | Ec/3HA5 | 2.17 | 0.0138 |
| | Ec/3HA6 | 1.77 | 0.0166 |
| | Ec/3HA7 | 1.14 | 0.0179 |

### Example 17

[0379] Production test 2 of adipic acid using mutant microorganisms of the genus Serratia with impaired pyruvate kinase function

[0380] The production test of adipic acid was conducted using the mutant microorganisms of the genus Serratia produced in Example 11 under anaerobic conditions.

[0381] The mutant microorganisms of the genus Serratia produced in Example 11 were cultured in the same manner as in Example 12. except that the mutant microorganisms were cultured statically using the culture medium II. The concentrations of adipic acid and other products accumulated in the culture supernatant and the concentration of sugars remaining unused in the culture medium were quantified. The yield of adipic acid calculated using the above formula (2) from the measured values is shown in Table 15.

### Comparative Example 9

[0382] Production test 2 of adipic acid using mutant microorganisms of the genus Serratia with intact pyruvate kinase function

[0383] The mutants produced in Reference Example 9 were cultured in the same manner as in Example 17. The concentrations of adipic acid and other products accumulated in the culture supernatant and the concentration of sugars remaining unused in the culture medium were quantified. The yield of adipic acid calculated using the above formula (2) from the measured values is shown in Table 15.

[0384] By comparing the results of Comparative Example 9 and Example 17, it was found that the yield of adipic acid was increased even under anaerobic conditions by impairing the function of pyruvate kinase in the microorganism of the genus Serratia .

TABLE 15

| | | Yield of |
|---|---|---|
| | Strain | ADA (%) |
| Example 17 | SgΔPP/ | N.D. |
| | pBBRpMW | |
| | SgΔPP/ADA1 | 0.0359 |
| | SgΔPP/ADA2 | 0.0480 |
| | SgΔPP/ADA3 | 0.0379 |
| | SgΔPP/ADA4 | 0.0395 |
| | SgΔPP/ADA5 | 0.0431 |
| | SgΔPP/ADA6 | 0.0490 |
| | SgΔPP/ADA7 | 0.0375 |
| Comparative | Sg/ | N.D. |
| Example 9 | pBBRpMW | |
| | Sg/ADA1 | 0.0152 |
| | Sg/ADA2 | 0.0181 |
| | Sg/ADA3 | 0.0188 |
| | Sg/ADA4 | 0.0179 |
| | Sg/ADA5 | 0.0135 |
| | Sg/ADA6 | 0.0130 |
| | Sg/ADA7 | 0.0093 |

### Example 18

[0385] Production test 2 of adipic acid using E. coli mutants with impaired pyruvate kinase function

[0386] The production test of adipic acid was conducted using the E. coli mutants produced in Example 13 under anaerobic conditions.

[0387] The E. coli mutants produced in Example 13 were cultured in the same manner as in Example 14, except that the mutants were cultured statically using the culture medium II. The concentrations of adipic acid and other products accumulated in the culture supernatant and the concentration of sugars remaining unused in the culture medium were quantified. The yield of adipic acid calculated using the above formula (2) from the measured values is shown in Table 16.

### Comparative Example 10

[0388] Production test 2 of adipic acid using E. coli mutants with intact pyruvate kinase function

[0389] The mutants produced in Reference Example 10 were cultured in the same manner as in Example 18. The concentrations of adipic acid and other products accumulated in the culture supernatant and the concentration of sugars remaining unused in the culture medium were quantified. The yield of adipic acid calculated using the above formula (2) from the measured values is shown in Table 16.

[0390] By comparing the results of Comparative Example 10 and Example 18, it was found that the yield of adipic acid was increased even under anaerobic conditions by impairing the function of pyruvate kinase in E. coli.

TABLE 16

| | | Yield of |
|---|---|---|
| | Strain | ADA (%) |
| Example 18 | EcΔPP/ | N.D. |
| | pBBRpMW | |
| | EcΔPP/ADA1 | 0.0255 |
| | EcΔPP/ADA2 | 0.0254 |
| | EcΔPP/ADA3 | 0.0269 |
| | EcΔPP/ADA4 | 0.0248 |
| | EcΔPP/ADA5 | 0.0212 |
| | EcΔPP/ADA6 | 0.0278 |
| | EcΔPP/ADA7 | 0.0212 |
| Comparative | Ec/ | N.D. |
| Example 10 | pBBRpMW | |
| | Ec/ADA1 | 0.0166 |
| | Ec/ADA2 | 0.0180 |
| | Ec/ADA3 | 0.0140 |
| | Ec/ADA4 | 0.0161 |
| | Ec/ADA5 | 0.0148 |
| | Ec/ADA6 | 0.0219 |
| | Ec/ADA7 | 0.0123 |

### Example 19

[0391] Generation of a mutant microorganism of the genus Serratia with defects in genes encoding pyruvate kinase and a phosphotransferase system enzyme

[0392] A mutant microorganism of the genus Serratia with impaired function of both pyruvate kinase and a phosphotransferase system enzyme was generated by disrupting a gene encoding a phosphotransferase, ptsG, in the SgΔPP strain produced in Example 1.

[0393] A PCR reaction was performed using pKD4 as a template and oligo DNAs represented by SEQ ID NOs: 239 and 240 as primers to obtain a PCR fragment of 1.6 kb in length for disruption of ptsG. The introduction of pKD46 into the above strain was followed by the introduction of the PCR fragment for disruption of ptsG into the resulting strain. Direct colony PCR was performed on the resulting kanamycin-resistant strains to confirm the deletion of the gene of interest and the insertion of a kanamycin resistance gene from the length of the amplified band. Oligo DNA primers represented by SEQ ID NOs: 223 and 242 were used.

[0394] Subsequently, an ampicillin-sensitive strain was obtained by segregating away the pKD46. The plasmid pCP20 was introduced into the ampicillin-sensitive strain, and ampicillin-resistant strains were again obtained. Direct colony PCR was performed on the obtained strains to confirm the deletion of the kanamycin resistance gene from the length of the amplified band. Oligo DNA primers represented by SEQ ID NOs: 241 and 242 were used. The pCP20 was segregated away from one of the kanamycin-sensitive strains. The obtained strain is hereinafter referred to as SgΔPPG.

### Example 20

[0395] Generation of a mutant microorganism of the genus Serratia with defects in genes encoding pyruvate kinase and a phosphotransferase system enzyme and carrying a plasmid expressing enzymes that catalyze the reactions A, B, E, and F By the same method as in Example 2, a plasmid produced in Reference Example 1, pBBR1MCS-2::ATCTOR1, was introduced into the SgΔPPG strain produced in Example 19, and the obtained mutant microorganism of the genus Serratia was designated as SgΔPPG3HA1.

### Example 21

[0396] Production test of 3-hydroxyadipic acid and α-hydromuconic acid using a mutant microorganism of the genus Serratia with impaired function of both pyruvate kinase and a phosphotransferase system enzyme and carrying a plasmid expressing enzymes that catalyze the reactions A, B, E, and F

[0397] By the same method as in Example 15, the production test of 3-hydroxyadipic acid and α-hydromuconic acid was conducted using the mutant microorganism of the genus Serratia produced in Example 20.

### Comparative Example 11

[0398] Production test of 3-hydroxyadipic acid and α-hydromuconic acid using a mutant microorganism of the genus Serratia with intact pyruvate kinase function and intact phosphotransferase system enzyme function and carrying a plasmid expressing enzymes that catalyze the reactions A, B. E, and F

[0399] By the same method as in Comparative Example 7, the production test of 3-hydroxyadipic acid and α-hydromuconic acid was conducted using the Sg314A1 strain produced in Reference Example 5.

[0400] By comparing the results of Example 21 and Example 15, it was found that the yields of 3-hydroxyadipic acid and α-hydromuconic acid were further increased in the mutant microorganism of the genus Serratia with defects in the genes encoding pyruvate kinase and the phosphotransferase system enzyme and with enhanced activity of an enzyme that catalyzes the reaction of reducing 3-oxoadipyl-CoA to 3-hydroxyadipyl-CoA. Additionally, by comparing the results of Example 21 and Comparative Example 11, it was found that the yields of acetic acid and ethanol, both of which were generated by conversion of acetyl-CoA, were also increased in the mutant with defects in the genes encoding pyruvate kinase and the phosphotransferase system enzyme.

TABLE 17

| | | | | Yield of | Yield of | |
|---|---|---|---|---|---|---|
| | | Yield of | Yield of | succinic | acetic | Yield of |
| | Strain | 3HA (%) | HMA (%) | acid (%) | acid (%) | ethanol (%) |
| Example 21 | SgΔPPG/3HA1 | 6.06 | 0.180 | 60.6 | 36.8 | 52.2 |
| Comparative | Sg/3HA1 | 1.68 | 0.0482 | 7.26 | 35.1 | 38.8 |
| Example 11 | | | | | | |

### Example 22

[0401] Generation of an E. coli mutant with defects in genes encoding pyruvate kinase and a phosphotransferase system enzyme

[0402] An E. coli mutant with impaired function of both pyruvate kinase and a phosphotransferase system enzyme was generated by disrupting a gene encoding a phosphotransferase,ptsG, in the EcΔPP produced in Example 4.

[0403] A PCR reaction was performed using pKD4 as a template and oligo DNAs represented by SEQ ID NOs: 243 and 244 as primers to obtain a PCR fragment of 1.6 kb in length for disruption of ptsG. The introduction of pKD46 into the above strain was followed by the introduction of the PCR fragment for disruption of ptsG into the resulting strain. Direct colony PCR was performed on the resulting kanamycin-resistant strains to confirm the deletion of the gene of interest and the insertion of a kanamycin resistance gene from the length of the amplified band. Oligo DNA primers represented by SEQ ID NOs: 223 and 246 were used.

[0404] Subsequently, an ampicillin-sensitive strain was obtained by segregating away the pKD46. The plasmid pCP20 was introduced into the ampicillin-sensitive strain, and ampicillin-resistant strains were again obtained. Direct colony PCR was performed on the obtained strains to confirm the deletion of the kanamycin resistance gene :from the length of the amplified band. Oligo DNA primers represented by SEQ ID NOs: 245 and 246 were used. The pCP20 was segregated away from one of the kanamycin-sensitive strains. The obtained strain is hereinafter referred to as EcΔPPG.

### Example 23

[0405] Generation of an E. coli mutant with defects in genes encoding pyruvate kinase and a phosphotransferase system enzyme and carrying a plasmid expressing enzymes that catalyze the reactions A, B, E, and F

[0406] By the same method as in Example 5, the pBBIUMCS-2::ATCTOR1 produced in Reference Example 1 was introduced into the EcΔPPG strain produced in Example 22, and the obtained E. coli mutant was designated as EcΔPPG3HA1.

### Example 24

[0407] Production test of 3-hydroxyadipic acid and u-hydromuconic acid using an E. coli mutant with impaired function of both pyruvate kinase and a phosphotransferase system enzyme and carrying a plasmid expressing enzymes that catalyze the reactions A, B, E, and F

[0408] By the same method as in Example 16, the production test of 3-hydroxyadipic acid and α-hydromuconic acid was conducted using the E. coli mutant produced in Example 23.

### Comparative Example 12

[0409] Production test of 3-hydroxyadipic acid and α-hydromuconic acid using an E. coli mutant with intact pyruvate kinase function and intact phosphotransferase system enzyme function and carrying a plasmid expressing enzymes that catalyze the reactions A, B, E, and F

[0410] By the same method as in Comparative Example 8, the production test of 3-hydroxyadipic acid and α-hydromuconic acid was conducted using the Ec/3HA1 produced in Reference Example 6.

[0411] By comparing the results of Example 24 and Example 16, it was found that the yields of 3-hydroxyadipic acid and α-hydromuconic acid were further increased in the E. coli mutant with defects in the genes encoding pyruvate kinase and the phosphotransferase system enzyme and with enhanced activity of an enzyme that catalyzes the reaction of reducing 3-oxoadipyl-CoA to 3-hydroxyadipyl-CoA. Additionally, by comparing the results of Example 24 and Comparative Example 12, it was found that the yields of acetic acid and ethanol, both of which were generated by conversion of acetyl-CoA, were also increased in the mutant with defects in the genes encoding pyruvate kinase and the phosphotransferase system enzyme.

TABLE 18

| | | | | Yield of | Yield of | |
|---|---|---|---|---|---|---|
| | | Yield of | Yield of | succinic | acetic | Yield of |
| | Strain | 3HA (%) | HMA (%) | acid (%) | acid (%) | ethanol (%) |
| Example 24 | EcΔPPG/3HA1 | 15.4 | 0.0439 | 60.2 | 51.3 | 58.0 |
| Comparative | Ec/3HA1 | 1.32 | 0.0171 | 12.6 | 36.7 | 40.7 |
| Example 12 | | | | | | |

The application's sequence listing, which the Patent Office published only in electronic form, follows.

SEQUENCE LISTING (246 sequences)

SEQ ID NO: 1 - protein, 509 aa, Serratia marcescens ATCC13880
MAESNAAIQSAAIIGAGTMGRGIAYLFAQKGIRTVLYNRNGNTLNQAREYIAQDLNKKVEQGKIALQDKGAVLANLMFTSVFEAIADSELVIETIAEQEQTKLEVLAAIAAVVKPDTLIATNTSSLSLNKLATAVTHSERFIGLHFFNPAPLMKLIEIIPAYFTAHATTERCRQLVAALGKHDVVCQATPGFIVNRMARPYYLEGFRLLEEHVARAAQIDRALKAGGRFRMGPLELTDFIGQDINYQVSRQIWQDMQYDPRYTPGHLQRSLVDAGLLGKKNGRSYFAAEETAPPVTAASNADVETLRVYGEHPFFTLLQQRAALQWPQLRVEQRPALPGLGSAVQINDAFTVSITDGRTASQLAEQTAADAFVVDVALNYADTTYLAAAHSRHASAANKALFLRLLHTAIPQVEFIKDSPALIVARVLSSLINESVIMVESGVCSREDIDVAAVAGVNYAGGIFDWLGKLGEKNVRTTLSNLAQLLHAARYAPHYTLLHAAQPALTTTP

SEQ ID NO: 2 - protein, 509 aa, Serratia nematodiphila DSM21420
MAESNAAIQSAAIIGAGTMGRGIAYLFAQKGIPTMLYNRNGNTLNQAREYIAQDLNKKVEQGKIALRDKDAVLANLMFTSVFEAIADSELVIETIAEQEQTKLEVLAAIAAVVKPDTLIATNTSSLSLNKLATAVTHSERFIGLHFFNPAPLMKLIEIIPAYFTAHATTERCRQLVAALGKRDVVCQATPGFIVNRMARPYYLEGFRLLEEHVARAAQIDRALKAGGRFRMGPLELTDFIGQDINYQVSRQIWQDMQYDPRYTPGHLQRSLVDAGLLGKKNGRSYFAAEETAPPVTAANNADVETLRVYGEHPFFTLLQQRAALQWPQLRVEQRPALPGLGAAVQINDAFTVSITDGRTASQLAEQTAADAFVVDLALNYADTTYLVAAHSRHASAANKALFLRLLHTAIPQVEFIKDSPALIVARVLSSLINESVIMVESGVCSREDIDVAAVAGVNYAGGIFDWLGKLGEKNVRTTLSNLAQLLHAARYAPHYTLLHAAQPALTTTP

SEQ ID NO: 3 - protein, 509 aa, Serratia plymuthica NBRC102599
MAENNSAIRSAAVIGAGTMGRGIAYLLALNGIRTVLYNRNGNNLNQARDYIVSDLDRKIDNGKITLQKKGQILANIIFSDVFDAITDSDLVIETIAEDEQTKHEILAAIAATVKPEAIIATNTSSLSLNKLAAGVENNPRFIGLHFFNPAPLMKLIEIIPSYFTSRATSLRCQQLVTALGKQFVVCKATPGFIVNRMARPFYLEGFRLLEENVALAPQIDRALKAGGHFRMGPLELTDFIGQDINYQVSKQIWQDMQFDPRYTPGHLQRSLVDAGLLGRKNGRSFFASQPATPPNPTTEGDTPTSLHFYGEHALFDHLQQRALATWPALRVQRLPERPELGRFILVNNRLAIKITDGRTANLLAGLTALDTFVIDAALNYADTAYLVAAHNQHATETNKALFLTLLQTLIAQVEFIKDSPALIVARVLSSLINESVIMVESGVCSRADIDIAAVAGVNYADGIFAWLAQLGQKNVKSTLDNMAQLLHSTRYYPHYSLLNAARPELAVAP

SEQ ID NO: 4 - protein, 509 aa, Serratia proteamaculans 568
MAENNSAIHSVAVIGAGTMGRGIAYLLAQNGIRTLLYNRSGNNLNQARDYIIRDLDKKIDGGKISPQKKGEILANLVFSPIFEAIADSDLVIETIAEHEATKHEILAAIAATVKKEAIIATNTSSLSLNKLAAGVENNARFIGLHFFNPAPLMKLIEIIPSYFTSRATSLRCQQLVTAIGKQFVVCKATPGFIVNRMARPFYLEGFRLLEENVALAPQIDRALKAGGHFRMGPLELTDFIGQDINYQVSSQIWQDMQYDPRYTPGHLQRSLVDAGLLGKKNGRSFFTPSSAEPSSADAGSGTPTSLNFYGEHPLFDLLQQRALALWPRVQINRQSEQPTLGRFIRVNDAMAIKITDGRTANLLAELTELDTFVIDAALNYADTAYLAAAHSQDASAANKALFLTLLQTLIPQVEFIKDSPGLIVARVLSSLINESVIMVESGVCSRADIDIAAVAGVNYADGIFSWLAQLGQKNVKSTLDNMAQLLHSARYYPHYSLLNTPRPELAVAP

SEQ ID NO: 5 - protein, 509 aa, Serratia ureilytica Lr5/4
MAESNAAIQSAAIIGAGTMGRGIAYLLAQKSIRTVLYNRNGNTLNQARDAIVQDLNKKVEQGKLALQDKDAVLANLTFSAEFGAIADSDLVIETIAEHEQAKLEVLAAIAATVKPDTLIATNTSSLSLNKLATAVTHSERFIGLHFFNPAPLMKLIEIIPAYFTAQVTTERCRQLVAALGKRDVVCQATPGFIVNRMARPYYLEGFRLLEEHVARAPQIDRALKAGGHFRMGPLELTDFIGQDINYQVSRQIWQDMQYDPRYTPGHLQRSLVDAGLLGKKNGRSYFSAEESPPPLAAAVDAEVETLRIYGEHPLFTLLQQRATLQWPRLRVEQRPTLPGLGAAIQVNDAFTVSVTDGRTANQLAEQTAADAFVVDVALNYGDTAYLVAAHSRHASAANKALFLRLLHTAIPQVEFIKDSPALIVARVLSSLINESVIMVESGVCSREDIDVAAVAGVNYADGIFGWLTRLGEENVRTTLSNLAQLLHAARYAPHYTLLHAAQPALTTTP

SEQ ID NO: 6 - protein, 509 aa, Serratia sp. BW106
MAENNSAIHSVAVIGAGTMGRGIAYLLAQNGIRTLLYNRSGNNLDQARDYIIRDLDKKIDNGKISQQKKGEVLANLVFSPIFDAIADSDLVIETIAEHETTKHEILAAIAATVKQEAIIATNTSSLSLNKLAAGVENNARFIGLHFFNPAPLMKLIEIIPSYFTSRATSLRCQQLVTALGKQFVVCKATPGFIVNRMARPFYLEGFRLLEENVALAPQIDRALKAGGHFRMGPLELTDFIGQDINYQVSSQIWQDMQYDPRYTPGHLQRSLVDAGLLGKKNGRSFFAAPSSESNPLDAGNGTLTSLHFYGEHTLFDLLQQRALAIWPTLQIIHQPERPTLGRFIRVNDALAVKITDGRTANLLAELTDLDTFVIDAALNYSDTAYLVAAHNQDAAEANKALFLSLLQTLIPQVEFIKDSPGLIVARVLSSLINESVIMVESGVCSRADIDIAAVAGVNYADGIFAWLTQLGQKNVKSTLDNMAQLLHSARYYPHYSLLNAPRPELAVAP

SEQ ID NO: 7 - protein, 509 aa, Serratia liquefaciens FK01
MAENNTAIDSVAVIGAGTMGRGIAYLLALNGIRTLLYNRNGNHLNQARDYIVGDLDKKIDNGKISQQKKGEVLANLVFSPVFDAIADSDLVIETIAEHEPTKHEILAAIAATVKKEAIIATNTSSLSLNKLAAGIENNSRFIGLHFFNPAPLMKLIEIIPSYFTARATTLRCQQLVTAIGKKFVVCKATPGFIVNRMARPFYLEGFRLLEENVALAPQIDRALKAGGHFRMGPLELTDFIGQDINYQVSSQIWQDMQYDPRYTPGHLQRSLVDAGLLGKKNGRSFFSPSADAANPPATGGGTLSSLHFFGEHPLFDLLQQHAFATWAPLAITRQPEHPVLGRFIQVNDSLAVKITDGRTANQLAELAGLDTFVVDVALNYANTAFLVAAHSQQATEANKELFLTLLQTVIPQVEFVKDSPGLIVARVLSSLINESVIMVESGVCSREDIDIAAVAGVNYADGIFAWLAQLGQKNVKSTLDNMAQLLHSARYYPHYSLLHATRPELAVAP

SEQ ID NO: 8 - protein, 509 aa, Serratia sp. S119
MAESNAAIQSAAIIGAGTMGRGIAYLFAQKGIRTVLYNRNGNTLNQAREYIAQDLNKKVEQGKIALQDKGAVLANLVFTSVFETIADSDLVIETIAEQEQTKLEVLAAIAAAVKPDTLIATNTSSLSLNKLATAVTHSERFIGLHFFNPAPLMKLIEIIPAYFTARATTERCRQLVAALGKRDVVCQATPGFIVNRMARPYYLEGFRLLEEHVARAPQIDRALKAGGHFRMGPLELTDFIGQDINYQVSRQIWQDMQYDPRYTPGHLQRSLVDAGLLGKKNGRSYFAAEENALPVTAATDADVETLRVYGEHPFFTLLQQRAALQWPRLRVEQRPALPGLGPAVQINEAFTVSVTDGRTASQLAELTAADAFVVDVALNYADTAYLVAAHNRHASAANKALFLRLLHTAIPQVEFIKDSPALIVARVLSSLINESVIMVESGVCSREDINVAAVAGVNYADGIFGLLDSLGEKNVRTTLSNLAQLLHAARYAPHYTLLHAAQPALTTTP

SEQ ID NO: 9 - protein, 509 aa, Serratia sp. YD25
MAERNAAIQSAAIIGAGTMGRGIAYLFAQKGIRTVLYNRNGNTLIQAREYIVQDLDKKVEQGRLAPQDKDAVLANLQFSSVFEAIVDSDLVLETIAEQEQAKLEVLAAIAAAVKPDTLIATNTSSLSLNKLATAVTHSERFIGLHFFNPAPLMKLIEIIPAYFTTQATTERCRQLVAALGKRDVVCQATPGFIVNRMARPYYLEGFRLLEEHVARAPQIDRALKAGGHFRMGPLELTDFIGQDINYQVSRQIWQDMQYDPRYTPGHLQRSLVDAGLLGKKNGRSYFSAEETAPPVEAAAEADVETLRIYGEHPLFTLLQQRAALQWPQLRVEQRPALSGLGAAIQVNDAFTVSVTDGRTANQLAEQTAADAFVVDVALNYADTAYLVAAHSRHASAANKALFLRLLHTALPQVEFIKDSPALIVARVLSSLINESVIMVESGVCSREDIDVAAVAGVNYADGIFGWLTRLGEKNVRTTLSNLAQLLHAARYAPHYTLLHAAQPALTTTP

SEQ ID NO: 10 - protein, 509 aa, Serratia sp. FS14
MAESNAAIQSAAIIGAGTMGRGIAYLFAQKGIPTMLYNRNGNTLNQAREYIAQDLNKKVEQGKIALQDKDAVLANLMFTSVFEAIADSELVIETIAEQEQTKLEVLAAIAAVVKPDTLIATNTSSLSLNKLATAVTHSERFIGLHFFNPAPLMKLIEIIPAYFTAHATTERCRQLVAALGKRDVVCQATPGFIVNRMARPYYLEGFRLLEEHVARAAQIDRALKAGGRFRMGPLELTDFIGQDINYQVSRQIWQDMQYDPRYTPGHLQRSLVDAGLLGKKNGRSYFAAEETAPPVTAANNADVETLRVYGEHPFFTLLQQRAALQWPQLRVEQRPALPGLGAAVQINDAFTVSITDGRTASQLAEQTAADAFVVDVALNYADTTYLVAAHSRHASAANKALFLRLLHTAIPQVEFIKDSPALIVARVLSSLINESVIMVESGVCSREDIDVAAVAGVNYAGGIFDWLGKLGEKNVRTTLSNLAQLLHAARYAPHYTLLHAAQPALTTTP

SEQ ID NO: 11 - protein, 509 aa, Serratia sp. HMSC15F11
MAESNAAIQSAAIIGAGTMGRGIAYLFAQKGIRTVLYNRNGNTLNQARDYIELDLNKKVEQGKIALQDKGAVLANLVFTSVFETIADSELVIETIAEQEQTKLEVLAAIAAAVKPDTLIATNTSSLSLNKLATAVTHSERFIGLHFFNPAPLMKLIEIIPAYFTAHATTERCRQLVAALGKRDVVCQATPGFIVNRMARPYYLEGFRLLEEHVARAPQIDRALKAGGHFRMGPLELTDFIGQDINYQVSRQIWQDMQYDARYTPGHLQRSLVDAGLLGKKNGRSYFAVEENAPPVMAATDADIETLHVYGEHPFFTLLQQRAALQWPQLRVEQRPALPGLGPAVRINDAFTVSITDGRTANQLAEQTAADAFVVDVALNYADTAYLVAAHSRHASAANKALFLRLLHTAIPQVEFIKDSPALIVARVLSSLINESVIMVESGVCSREDIDVAAVAGVNYADGIFGWLDSLGEKNVRTTLSNLAQLLHAARYAPHYTLLHAAQPALTTTP

SEQ ID NO: 12 - protein, 509 aa, Serratia sp. JKS000199
MAESNAAIQSAAIIGAGTMGRGIAYLLAQKSIRTVLYNRNGNTLNQARDAIVQDLNKKVEQGKLALQDKDAVLANLTFSTEFGAIADSDLVIETIAEHEQAKLEVLAAIAATVKPDTLIATNTSSLSLNKLATAVTHSERFIGLHFFNPAPLMKLIEIIPAYFTAQVTTERCRQLVAALGKRDVVCQATPGFIVNRMARPYYLEGFRLLEEHVARAPQIDRALKAGGHFRMGPLELTDFIGQDINYQVSRQIWQDMQYDPRYTPGHLQRSLVDAGLLGKKNGRSYFSAEESPPPLAAAVDAEVETLRIYGEHPLFTLLQQRAALQWPRLRVEQRPTLPGLGAAIQVNDAFTVSVTDGRTANQLAEQTAADAFVVDVALNYGDTAYLVAAHSRHASAANKALFLRLLHTAIPLVEFIKDSPALIVARVLSSLINESVIMVESGVCSREDIDVAAVAGVNYADGIFGWLTRLGEENVRTTLSNLAQLLHAARYAPHYTLLHAAQPALTTTP

SEQ ID NO: 13 - protein, 509 aa, Serratia sp. TEL
MAESNAAIQSAAIIGAGTMGRGIAYLLAQKSIRTVLYNRNGNTLNQARDAIVQDLNKKVEQGKLALQDKDAVLANLTFSAEFGAIADSDLVIETIAEHEQAKLEVLAAIAATVKPDTLIATNTSSLSLNKLATAVTHSERFIGLHFFNPAPLMKLIEIIPAYFTAQVTTERCRQLVAALGKRDVVCQATPGFIVNRMARPYYLEGFRLLEEHVARAPQIDRALKAGGHFRMGPLELTDFIGQDINYQVSRQIWQDMQYDPRYTPGHLQRSLVDAGLLGKKNGRSYFSAEESPPPLAAAVDAEVETLRIYGEHPLFTLLQQRATLQWPRLRVEQRPTLPGLGAAIQVNDAFTVSVTDGRTANQLAEQTAADAFVVDVALNYGDTAYLVAAHSRHASAANKALFLRLLHTAIPQVEFIKDSPALIVARVLSSLINESVIMVESGVCSREDIDVAAVAGVNYADGIFGWLTRLGEENVRATLSNLAQLLHAARYAPHYTLLHAAQPALTTTP

SEQ ID NO: 14 - protein, 509 aa, Serratia sp. ISTD04
MAESNAAIQSAAIIGAGTMGRGIAYLLAQKSIRTVLYNRNGNTLNQARDAIVQDLNKKVEQGKLALQDKDAVLANLTFSAEFGVIADSDLVIETIAEHEQAKLEVLAAIAATVKSDTLIATNTSSLSLNKLATAVTHSERFIGLHFFNPAPLMKLIEIIPAYFTAQVTTERCRQLVAALGKRDVVCQATPGFIVNRMARPYYLEGFRLLEEHVARAPQIDRALKAGGHFRMGPLELTDFIGQDINYQVSRQIWQDMQYDPRYTPGHLQRSLVDAGLLGKKNGRSYFSAEESPPPLAAAVDAEVETLRIYGEHPLFTLLQQRAALQWPRLRVEQRPTLPGLGAAIQVNDAFTVSVTDGRTANQLAEQTAADAFVVDVALNYGDTAYLVAAHSRHASAANKALFLRLLHTAIPQVEFIKDSPALIVARVLSSLINESVIMVESGVCSREDIDVAAVAGVNYADGIFGWLTRLGEENVRTTLSNLAQLLHAARYAPHYTLLHAAQPALTTTP

SEQ ID NO: 15 - protein, 509 aa, Serratia sp. SCBI
MAESNAAIQSAAIIGAGTMGRGIAYLLAQKSIRTVLYNRNGNTLNQARDAIVQDLNKKVEQGKLALQDKDAVLANLTFSAEFGAIADSDLVIETIAEHEQAKLEVLAAIAATVKPDTLIATNTSSLSLNKLATAVTHSERFIGLHFFNPAPLMKLIEIIPAYFTAQVTTERCRQLVAALGKRDVVCQATPGFIVNRMARPYYLEGFRLLEEHVARAPQIDRALKAGGHFRMGPLELTDFIGQDINYQVSRQIWQDMQYDPRYTPGHLQRSLVDAGLLGKKNGRSYFSTEESPPPLAAAVDAEVETLRIYGEHPLFTLLQQRAALQWPRLRVEQRPTLPGLGAAIQVNDAFTVSVTDGRTANQLAEQTAADAFVVDVALNYGDTAYLVAAHSRHASAANKALFLRLLHTAIPQVEFIKDSPALIVARVLSSLINESVIMVESGVCSREDIDVAAVAGVNYADGIFGWLTRLGEENVRTTLSNLAQLLHAARYAPHYTLLHAAQPALTTTP

SEQ ID NO: 16 - protein, 509 aa, Serratia sp. S4
MAENNSAIHSVAVIGAGTMGRGIAYLLAQNGIRTLLYNRSGNNLNQARDYIIRDLDKKIDGGKISLQKKGEILANLVFSPIFEAIADSDLVIETIAEHESTKHEILSAIAATVKKEAIIATNTSSLSLNKLAAGVENNARFIGLHFFNPAPLMKLIEIIPSYFTSRATSLRCQQLVTVIGKQFVVCKATPGFIVNRMARPFYLEGFRLLEENVALAPQIDRALKAGGHFRMGPLELTDFIGQDINYQVSSQIWQDMQYDPRYTPGHLQRSLVDAGLLGKKNGRSFFTPSSATPSSADAGSGTPTSLNFYGEHPLFDLLQQRALALWPRLQINRQSEQPTLGRFIRVNDAMAIKITDGRTANLLAELTELDTFVIDAALNYADTAYLAAAHSQDASTANKALFLTLLQTLIPQVEFIKDSPGLIVARVLSSLINESVIMVESGVCSRADIDIAAVAGVNYADGIFSWLAQLGQKNVKSTLDNMAQLLHSARYYPHYSLLNTPRPELAVAP

SEQ ID NO: 17 - protein, 509 aa, Serratia sp. C-1
MAENNSAIRSAAVIGAGTMGRGIAYLLALNGIRTVLYNRNGNNLNQARDYIVSDLDRKIDNGKITLQKKGQILANIIFSAVFDAITDSDLVIETIAEDEQTKHEILAAIAATVKPEAIIATNTSSLSLNKLAAGVENNPRFIGLHFFNPAPLMKLIEIIPSYFTSHATSLRCQKLVIALGKQFVVCKATPGFIVNRMARPFYLEGFRLLEENVALAPQIDRALKAGGHFRMGPLELTDFIGQDINYQVSKQIWQDMQFDPRYTPGHLQRSLVDAGLLGRKNGRSFFASQPATPPTPTTESDTPTSLHFYGEHALFDHLQQRALAAWPALRVQRLPERPELGRFILVNNALAIKITDGRTANLLAGLTALDTFVIDAALNYADTAYLVAAHNQHATETNKALFLTLLQTVIAQVEFIKDSPALIVARVLSSLINESVIMVESGVCSRADIDIAAVAGVNYADGIFAWLAQLGQKNVKSTLDNMAQLLHSARYYPHYSLLNAARPELAVAP

SEQ ID NO: 18 - protein, 509 aa, Serratia marcescens 532
MAESNAAIQSAAIIGAGTMGRGIAYLFAQKGIRTVLYNRNGNTLNQAREYIAQDLNKKVEQGKIALQDKGAVLANLMFTSVFEAITDSELVIETIAEQEQTKLEVLAAIAAVVKPDTLIATNTSSLSLNKLATAVTHSERFIGLHFFNPAPLMKLIEIIPAYFTAHATTERCRQLVAALGKHDVVCQATPGFIVNRMARPYYLEGFRLLEEHVARAAQIDRALKAGGRFRMGPLELTDFIGQDINYQVSRQIWQDMQYDPRYTPGHLQRSLVDAGLLGKKNGRSYFAAEETAPPVTAASNADVETLRVYGEHPFFTLLQQRAALQWPQLRVEQRPALPGLGSAVQINDAFTVSITDGRTASQLAEQTAADAFVVDVALNYADTTYLAAAHSRHASAANKALFLRLLHTAIPQVEFIKDSPALIVARVLSSLINESVIMVESGVCSREDIDVAAVAGVNYAGGIFDWLGKLGEKNVRTTLSNLAQLLHAARYAPHYTLLHAAQPALTTTP

SEQ ID NO: 19 - protein, 509 aa, Serratia marcescens 2880STDY5683033
MAESNAAIQSAAIIGAGTMGRGIAYLFAQKGIRTVLYNRNGNTLNQAREYIAHDLNKKVEQGKIALQDKGAVLANLMFTSVFEAIADSELVIETIAEQEQTKLEVLAAIAAVVKPDTLIATNTSSLSLNKLATAVTHSERFIGLHFFNPAPLMKLIEIIPAYFTAHATTERCRQLVAALGKHDVVCQATPGFIVNRMARPYYLEGFRLLEEHVARAAQIDRALKAGGRFRMGPLELTDFIGQDINYQVSRQIWQDMQYDPRYTPGHLQRSLVDAGLLGKKNGRSYFATEETAPPVTAASNADVETLRVYGEHPFFTLLQQRAALQWPQLRVEQRPALPGLGSAVQINDAFTVSITDGRTASQLAEQTAADAFVVDVALNYADTTYLAAAHSRHASAANKALFLRLLHTAIPQVEFIKDSPALIVARVLSSLINESVIMVESGVCSREDIDVAAVAGVNYAGGIFDWLGKLGEKNVRTTLSNLAQLLHAARYAPHYTLLHAAQPALTTTP

SEQ ID NO: 20 - protein, 509 aa, Serratia marcescens WW4
MAESNAAIQSAAIIGAGTMGRGIAYLFAQKGIPTMLYNRNGNTLNQAREYIAQDLNKKVEQGKIALQDKDAVLANLMFTSVFEAIADSELVIETIAEQEQTKLEVLAAIAAVVKPDTLIATNTSSLSLNKLATAVTHSERFIGLHFFNPAPLMKLIEIIPAYFTAHATTERCRQLVAALGKRDVVCQATPGFIVNRMARPYYLEGFRLLEEHVARAAQIDRALKAGGRFRMGPLELTDFIGQDINYQVSRQIWQDMQYDPRYTPGHLQRSLVDAGLLGKKNGRSYFAAEETAPPVTAANNADVETLRVYGEHPFFTLLQQRAALQWPQLRVEQRPALPGLGAAVQINDAFTVSITDGRTASQLAEQTAADAFVIDVALNYADTTYLVAAHSRHASAANKALFLRLLHTAIPQVEFIKDSPALIVARVLSSLINESVIMVESGVCSREDIDVAAVAGVNYAGGIFDWLGKLGEKNVRTTLSNLAQLLHAARYAPHYTLLHAAQPALTTTP

SEQ ID NO: 21 - protein, 509 aa, Serratia marcescens K27
MAESNAAIQSAAIIGAGTMGRGIAYLFAQKGIPTMLYNRNGNTLNQAREYIAQDLNKKVEQGKIALQDKDAVLANLMFTSVFEAIADSELVIETIAEQEQTKLEVLAAIAAVVKPDTLIATNTSSLSLNKLATAVTHSERFIGLHFFNPAPLMKLIEIIPAYFTAHATTERCRQLVAALGKRDVVCQATPGFIVNRMARPYYLEGFRLLEEHVARSAQIDRALKAGGRFRMGPLELTDFIGQDINYQVSRQIWQDMQYDPRYTPGHLQRSLVDAGLLGKKNGRSYFAAEETAPPVTAANNADVETLRVYGEHPFFTLLQQRAALQWPQLRVEQRPALPGLGAAVQINDAFTVSITDGRTASQLAEQTAADAFVVDVALNYADTTYLVAAHSRHASAANKALFLRLLHTAIPQVEFIKDSPALIVARVLSSLINESVIMVESGVCSREDIDVAAVAGVNYAGGIFDWLGKLGERNVRTTLSNLAQLLHAARYAPHYTLLHAAQPALTTTP

SEQ ID NO: 22 - protein, 509 aa, Serratia marcescens 280
MAESNAAIQSAAIIGAGTMGRGIAYLFAQKGIPTMLYNRNGNTLNQAREYIAQDLNKKVEQGKIALQDKDAVLANLMFTSVFEAIADSELVIETIAEQEQTKLEVLAAIAAVVKPDTLIATNTSSLSLNKLATAVTHSERFIGLHFFNPAPLMKLIEIIPAYFTAHATTERCRQLVAALGKRDVVCQATPGFIVNRMARPYYLEGFRLLEEHVARAAQIDRALKAGGRFRMGPLELTDFIGQDINYQVSRQIWQDMQYDPRYTPGHLQRSLVDAGLLGKKNGRSYFAAEETAPPVTAANNADVETLRVYGEHPFFTLLQQRAALQWPQLRVEQRPALPGLGAAVQINDAFTVSITDGRTASQLAEQTAADAFVVDVALNYADTTYLVAAHSRHASAANKALFLLLLHTAIPQVEFIKDSPALIVARVLSSLINESVIMVESGVCSREDIDVAAVAGVNYAGGIFDWLGKLGEKNVRTTLSNLAQLLHAARYAPHYTLLHAAQPALTTTP

SEQ ID NO: 23 - protein, 509 aa, Serratia marcescens 19F
MAESNAAIQSAAIIGAGTMGRGIAYLFAQKGIPTMLYNRNGNTLNQAREYIAQDLNKKVEQGKIALQDKDAVLANLMFTSVFEAIADSELVIETIAEQEQTKLEVLAAIAAVVKHDTLIATNTSSLSLNKLATAVTHSERFIGLHFFNPAPLMKLIEIIPAYFTAHATTERCRQLVAALGKRDVVCQATPGFIVNRMARPYYLEGFRLLEEHVARAAQIDRALKAGGRFRMGPLELTDFIGQDINYQVSRQIWQDMQYDPRYTPGHLQRSLVDAGLLGKKNGRSYFAAEETAPPVTAANNADVETLRVYGEHPFFTLLQQRAALQWPQLRVEQRPALPGLGAAVQINDAFTVSITDGRTASQLAEQTAADAFVVDVALNYADTTYLVAAHSRHASAANKALFLRLLHTAIPQVEFIKDSPALIVARVLSSLINESVIMVESGVCSREDIDVAAVAGVNYAGGIFDWLGKLGEKNVRTTLSNLAQLLHAARYAPHYTLLHAAQPALTTTP

SEQ ID NO: 24 - protein, 509 aa, Serratia marcescens 1185
MAESNAAIQSAAIIGAGTMGRGIAYLFAQKGIPTMLYNRNGNTLNQAREYIAQDLNKKVEQGKIALRDKDAVLANLMFTSVFEAIADSELVIETIAEQEQTKLEVLAAIAAVVKPDTLIATNTSSLSLNKLATAVTHSERFIGLHFFNPAPLMKLIEIIPAYFTAHATTERCRQLVAALGKHDVVCQATPGFIVNRMARPYYLEGFRLLEEHVARAAQIDRALKAGGRFRMGPLELTDFIGQDINYQVSRQIWQDMQYDPRYTPGHLQRSLVDAGLLGKKNGRSYFAAEETAPPVTAANNADVETLRVYGEHPFFTLLQQRAALQWPQLRVEQRPALPGLGAAVQINDAFTVSITDGRTASQLAEQTAADAFVVDLALNYADTTYLVAAHSRHASAANKALFLRLLHTAIPQVEFIKDSPALIVARVLSSLINESVIMVESGVCSREDIDVAAVAGVNYAGGIFDWLGKLGEKNVRTTLSNLAQLLHAARYAPHYTLLHAAQSALTTTP

SEQ ID NO: 25 - protein, 509 aa, Serratia marcescens S2I7
MAESNAAIQSAAIIGAGTMGRGIAYLFAQKGIPTMLYNRNGNTLNQAREYIAQDLNKKVEQGKIALQDKDAVLANLMFTSVFEAIADSELVIETIAEQEQTKLEVLAAIAAVVKPDTLIATNTSSLSLNKLATAVTHSERFIGLHFFNPAPLMKLIEIIPAYFTAHATTERCRQLVAALGKRDVVCQATPGFIVNRMARPYYLEGFRLLEEHVARAAQIDRALKAGGRFRMGPLELTDFIGQDINYQVSRQIWQDMQYDPRYTPGHLQRSLVDAGLLGKKNGRSYFAAEETAPPVTAANNADVETLRVYGEHPFFTLLQQRAALQWPQLCVEQRPALPGLGAAVQINDAFTVSITDGRTASQLAEQTAADAFVVDVALNYADTTYLVAAHSRHASAANKALFLRLLHTAIPQVEFIKDSPALIVARVLSSLINESVIMVESGVCSREDIDVAAVAGVNYAGGIFDWLGKLGERNVRTTLSNLAQLLHAARYAPHYTLLHAAQPALTTTP

SEQ ID NO: 26 - protein, 509 aa, Serratia marcescens KHCo-24B
MAESNAAIQSAAIIGAGTMGRGIAYLFAQKGIPTMLYNRNGNTLNQAREYIAQDLNKKVEQGKIALRDKDAVLANLMFTSVFEAIADSELVIETIAEQEQTKLEVLAAIAAVVKPDTLIATNTSSLSLNKLATAVTHSERFIGLHFFNPAPLMKLIEIIPAYFTAHATTERCRQLVAALGKRDVVCQATPGFIVNRMARPYYLEGFRLLEEHVARAAQIDRALKAGGRFRMGPLELTDFIGQDINYQVSRQIWQDMQYDPRYTPGHLQRSLVDAGLLGKKNGRSYFAAEETAPPVTAANNADVETLRVYGEHPFFTLLQQRAALQWPQLRVEQRPALPGLGAAVQINDAFTVSITDGRTASQLAEQAAADAFVVDLALNYADTTYLVAAHSRHASAANKALFLRLLHTAIPQVEFIKDSPALIVARVLSSLINESVIMVESGVCSREDIDVAAVAGVNYAGGIFDWLGKLGEKNVRTTLSNLAQLLHAARYAPHYTLLHAAQPALTTTP

SEQ ID NO: 27 - protein, 509 aa, Serratia marcescens Z6
MAESNAAIQSAAIIGAGTMGRGIAYLFAQKGIPTMLYNRNGNTLNQAREYIAQDLNKKVEQGKIALQDKDAVLANLMFTSVFEAIADSELVIETIAEQEQTKLEVLAAIAAVVKPDTLIATNTSSLSLNKLATAVTHRERFIGLHFFNPAPLMKLIEIIPAYFTAHATTERCRQLVAALGKRDVVCQATPGFIVNRMARPYYLEGFRLLEEHVARAAQIDRALKAGGRFRMGPLELTDFIGQDINYQVSRQIWQDMQYDPRYTPGHLQRSLVDAGLLGKKNGRSYFAAEETAPPVTAANNADVETLRVYGEHPFFTLLQQRAALQWPQLCVEQRPALPGLGAAVQINDAFTVSITDGRTASQLAEQTAADAFVIDVALNYADTTYLVAAHSRHASAANKALFLRLLHTAIPQVEFIKDSPALIVARVLSSLINESVIMVESGVCSREDIDVAAVAGVNYAGGIFDWLGKLGEKNVRTTLSNLAQLLHAARYAPHYTLLHAAQPALTTTP

SEQ ID NO: 28 - protein, 509 aa, Serratia marcescens 546
MAESNAAIQSAAIIGAGTMGRGIAYLFAQKGIPTMLYNRNGNTLNQAREYIAQDLNKKVEQGKIALRDKDAVLANLMFTSVFEAIADSELVIETIAEQEQTKLEVLAAIAAVVKPDTLIATNTSSLSLNKLSTAVTHNERFIGLHFFNPAPLMKLIEIIPAYFTAHATTERCRQLVAALGKRDVVCQATPGFIVNRMARPYYLEGFRLLEEHVARAAQIDRALKAGGRFRMGPLELTDFIGQDINYQVSRQIWQDMQYDPRYTPGHLQRSLVDAGLLGKKNGRSYFAAEETAPPVTAANNADVETLRVYGEHPFFTLLQQRAALQWPQLRVEQRPALPGLGAAVRINDAFTVSITDGRTASQLAEQTAADAFVVDVALNYADTTYLVAAHSRHASAANKALFLRLLHTAIPQVEFIKDSPALIVARVLSSLINESVIMVESGVCSREDIDVAAVAGVNYAGGIFDWLGKLGEKNVRTTLSNLAQLLHAARYAPHYTLLHAAQPALTTTP

SEQ ID NO: 29 - protein, 509 aa, Serratia nematodiphila MB307
MAESNAAIQSAAIIGAGTMGRGIAYLFAQKGIPTMLYNRNGNTLNQAREYIAQDLNKKVEQGKIALRDKDAVLANLMFTSVFEAIADSELVIETIAEQEQTKLEVLAAIAAVVKPDTLIATNTSSLSLNKLATAVTHSERFIGLHFFNPAPLMKLIEIIPAYFTAHATTERCRQLVAALGKRDVVCQATPGFIVNRMARPYYLEGFRLLEEHVARAAQIDRALKAGGRFRMGPLELTDFIGQDINYQVSRQIWQDMQYDPRYTPGHLQRSLVDAGLLGKKNGRSYFAAEETAPQVTAANNADVETLRVYGEHPFFTLLQQRAALQWPQLRVEQRPALPGLGAAVQINDAFTVSITDGRTASQLAEQTAADAFVVDLALNYADTTYLVAAHSRHASAANKALFLRLLHTAIPQVEFIKDSPALIVARVLSSLINESVIMVESGVCSREDIDVAAVAGVNYAGGIFDWLGKLGEKNVRTTLSNLAQLLHAARYAPHYTLLHAAQPALTTTP

SEQ ID NO: 30 - protein, 509 aa, Serratia marcescens VGH107
MAESNAAIQSAAIIGAGTMGRGIAYLFAQKGIPTMLYNRNGNTLNQAREYIAQDLNKKVEQGKIALQDKDAVLANLMFTSVFEAIADSELVIETIAEQEQTKLEVLAAIAAVVKHDTLIATNTSSLSLNKLATAVTHSERFIGLHFFNPAPLMKLIEIIPAYFTAHATTERCRQLVAALGKRDVVCQATPGFIVNRMARPYYLEGFRLLEEHVARAAQIDRALKAGGRFRMGPLELTDFIGQDINYQVSRQIWQDMQYDPRYTPGHLQRSLVDAGLLGKKNGRSYFAAEETAPPVTAANNADVETLRVYGEHPFFTLLQQRAALQWPQLRVEQRPALPGLGAAVQINDAFTVSITDGRTASQLAEQTAADAFVVDVALNYADTTYLVAAHSRHASAANKALFLRLLHTAIPQVEFIKDSPALIVARVLSSLINESVIMVESGVCSREDIDVAAVAGVNYAGGIFDWLGKLGEKNVRTMLSNLAQLLHAARYAPHYNLLHAAQPALTTTP

SEQ ID NO: 31 - protein, 509 aa, Serratia marcescens MCB
MAESNAAIQSAAIIGAGTMGRGIAYLFAQKGIRTVLYNRNGNTLNQAREYIAQDLNKKVEQGKIALQDKSSVLANLVFSTALEAIADSELVIETIAEHEQTKLEVLAAIAAVVKPDTLIATNTSSLSLNKLATAVTHSERFIGLHFFNPAPLMKLIEIIPAYFTAHATTERCRQLVAALGKRDVVCQATPGFIVNRMARPYYLEGFRLLEEHVARAPQIDRALKAGGHFRMGPLELTDFIGQDINYQVSRQIWQDMQYDPRYTPGHLQRSLVDAGLLGKKNGRSYFTAEETAPPVTAAIGADVETLRIYGEHPFFTLLQQRAALQWPQLRVEQRPALPGVGPAVQINDAFTVSITDGRTASQLAEQTTADAFVVDIALNYADTAYLVAAHNRHASAANKALFLRLLHTAIPQVEFIKDSPALIVARVLSSLINESVIMVESGVCSREDIDVAAVAGVNYAGGIFDWLSKLGEKNVRTTLSNLAQLLHAARYAPHYTLLHAAQPALTTTP

SEQ ID NO: 32 - protein, 509 aa, Serratia marcescens AH0650
MAESNAAIQSAAIIGAGTMGRGIAYLFAQKGIRTVLYNRNGNTLNQAREYIAQDLNKKVEQGKIALQDKSSVLANLVFSTALEAIADSELVIETIAEHEQTKLEVLAAIAAVVKPDTLIATNTSSLSLNKLATAVTHSERFIGLHFFNPAPLMKLIEIIPAYFTAHATTERCRQLVAALGKRDVVCQATPGFIVNRMARPYYLEGFRLLEEHVARAPQIDRALKAGGHFRMGPLELTDFIGQDINYQVSRQIWQDMQYDPRYTPGHLQRSLVDAGLLGKKNGRSYFAAEETAPPVTAAIDADVETLRVYGEHPFFTLLQQRAARQWPQLRVEQRPALPSLGPAVQINDAFTVSITDGRTASQLAEQTTADAFVVDIALNYADTAYLVAAHNRYASAANKALFLRLLHTAIPQVEFIKDSPALIVARVLSSLINESVIMVESGVCSREDIDVAAVAGVNYAGGIFDWLGKLGEKNVRTTLSNLAQLLHAARYAPHYTLLHAAQPALTTTP

SEQ ID NO: 33 - protein, 509 aa, Serratia marcescens UMH12
MAESNAEIQSAAIIGAGTMGRGIAYLFAQKGIRTVLYNRNGNTLNQAREYIAQDLNKKVEQGKIALQDKSSVLANLVFSTALEAIADSELVIETIAEHEQTKLEVLAAIAAVVKPDTLIATNTSSLSLNKLATAVTHSERFIGLHFFNPAPLMKLIEIIPAYFTAHATTERCRQLVAALGKRDVVCQATPGFIVNRMARPYYLEGFRLLEEHVARAPQIDRALKAGGHFRMGPLELTDFIGQDINYQVSRQIWQDMQYDPRYTPGHLQRSLVDAGLLGKKNGRSYFAAEETAPPVTAAIDADVETLRVYGEHPFFTLLQQRAARQWPQLRVEQRPALPSLGPAVQINDAFTVSITDGRTASQLAEQTTADAFVVDIALNYADTAYLVAAHNRYASAANKALFLRLLHTAIPQVEFIKDSPALIVARVLSSLINESVIMVESGVCSREDIDVAAVAGVNYAGGIFDWLGKLGEKNVRTTLSNLAQLLHAARYAPHYTLLHAAQPALTTTP

SEQ ID NO: 34 - protein, 509 aa, Serratia sp. OMLW3
MAESNAAIQSAAIIGAGTMGRGIAYLFAQKGIRTVLYNRNGNTLNQAREYIAQDLNKKVEQGKIALQDKSSVLANLVFSTALVAIADSELVIETIAEHEQTKLEVLAAIAAVVKPDTLIATNTSSLSLNKLATAVTHSERFIGLHFFNPAPLMKLIEIIPAYFTAHATTERCRQLVAALGKRDVVCQATPGFIVNRMARPYYLEGFRLLEEHVARAPQIDRALKAGGHFRMGPLELTDFIGQDINYQVSRQIWQDMQYDPRYTPGHLQRSLVDAGLLGKKNGRSYFAAEETAPPVTAAIDADVETLRVYGEHPFFTLLQQRAARQWPQLRVEQRPALPSLGPAVQINDAFTVSITDGRTASQLAEQTTADAFVVDIALNYADTAYLVAAHNRYASAANKALFLRLLHTAIPQVEFIKDSPALIVARVLSSLINESVIMVESGVCSREDIDVAAVAGVNYAGGIFDWLGKLGEKNVRTTLSNLAQLLHAARYAPHYTLLHAAQPALTTTP

SEQ ID NO: 35 - protein, 509 aa, Serratia marcescens UMH11
MAESNAAIQSAAIIGAGTMGRGIAYLFAQKGIRTVLYNRSGNTLNQAREYIAQDLNKKVEQGKIALQDKSSVLANLVFSTALVAIADSELVIETIAEHEQTKLEVLAAIAAVVKPDTLIATNTSSLSLNKLATAVTHSERFIGLHFFNPAPLMKLIEIIPAYFTAHATTERCRQLVAALGKRDVVCQATPGFIVNRMARPYYLEGFRLLEEHVARAPQIDRALKAGGHFRMGPLELTDFIGQDINYQVSRQIWQDMQYDPRYTPGHLQRSLVDAGLLGKKNGRSYFAAEETAPPVTAAIDADVETLRVYGEHPFFTLLQQRAARQWPQLRVEQRPALPSLGPAVQINDAFTVSITDGRTASQLAEQTTADAFVVDIALNYADTAYLVAAHNRYASAANKALFLRLLHTAIPQVEFIKDSPALIVARVLSSLINESVIMVESGVCSREDIDVAAVAGVNYAGGIFDWLGKLGEKNVRTTLSNLAQLLHAARYAPHYTLLHAAQPALTTTP

SEQ ID NO: 36 - protein, 509 aa, Serratia marcescens UMH1
MAESNAAIQSAAIIGAGTMGRGIAYLFAQKGIRTVLYNRNGNTLNQAREYIAQDLNKKVEQGKIALQDKSSVLANLVFSTALEAIADSELVIETIAEHEQTKLEVLAAIAAVVKPDTLIATNTSSLSLNKLATAVTHSERFIGLHFFNPAPLMKLIEIIPAYFTAHATTERCRQLVAALGKRDVVCQATPGFIVNRMARPYYLEGFRLLEEHVARAPQIDRALKAGGHFRMGPLELTDFIGQDINYQVSRQIWQDMQYDPRYTPGHLQRSLVDAGLLGKKNGRSYFAAEETAPPVTAAIDADVETLRVYGEHPFFTLLQQQAARQWPQLRVEQRPALPSLGPAVQINGAFTVSITDGRTASQLAEQTTADAFVIDIALNYADTAYLVAAHNRYASAANKALFLRLLHTAIPQVEFIKDSPALIVARVLSSLINESVIMVESGVCSREDIDVAAVAGVNYAGGIFDWLGKLGEKNVRTTLSNLAQLLHAARYAPHYTLLHAAQPALTTTP

SEQ ID NO: 37 - protein, 509 aa, Serratia marcescens 2880STDY5683020
MAESNAAIQSAAIIGAGTMGRGIAYLFAQKGIRTVLYNRNGNTLNQAREYIAQDLNKKVEQGKIALQDKGAVLANLVFTSVFETIADSDLVIETIAEQEQTKLEVLAAIAAAVKPDTLIATNTSSLSLNKLATAVTHSERFIGLHFFNPAPLMKLIEIIPAYFTARATTERCRQLVAALGKRDVVCQATPGFIVNRMARPYYLEGFRLLEEHVARAPQIDRALKAGGHFRMGPLELTDFIGQDINYQVSRQIWQDMQYDPRYTPGHLQRSLVDAGLLGKKNGRSYFAAEENALPVTAATDADVETLRVYGEHPFFTLLQQRAALQWPRLRVEQRPALPGLGPAVQINEAFTVSVTDGRTASQLAEQTAADAFVVDVALNYADTAYLVAAHNRHASAANKALFLRLLHTAIPQVEFIKDSPALIVARVLSSLINESVIMVESGVCSREDIDVAAVAGVNYADGIFGWLDSLGEKNVRTTLSNLAQLLHAARYAPHYTLLHAAQPALTTTP

SEQ ID NO: 38 - protein, 509 aa, Serratia marcescens 99
MAESNAAIQSAAIIGAGTMGRGIAYLFAQKGIRTVLYNRNGNTLNQAREYIAQDLNKKVEQGKIALQDKGAVLANLVFTSVFETIADSDLVIETIAEQEQTKLEVLAAIAAAVKPDTLIATNTSSLSLNKLATAVTHSERFIGLHFFNPAPLMKLIEIIPAYFTARATTERCRQLVAALGKRDVVCQATPGFIVNRMARPYYLEGFRLLEEHVARAPQIDRALKAGGHFRMGPLELTDFIGQDINYQVSRQIWQDMQYDPRYTPGHLQRSLVDAGLLGKKNGRSYFAAEENALPVTAASNADVETLRVYGEHPFFTLLQQRAALQWPRLRVEQRPALPGLGPAVQINEAFTVSVTDGRTASQLAELTAADAFVVDVALNYADTAYLVAAHNRHASAANKALFLRLLHTAIPQVEFIKDSPALIVARVLSSLINESVIMVESGVCSREDIDVAAVAGVNYADGIFGWLDSLGEKNVRTTLSNLAQLLHAARYAPHYTLLHAAQPVLTTTP

SEQ ID NO: 39 - protein, 509 aa, Serratia marcescens 374
MAESNAAIQSAAIIGAGTMGRGIAYLFAQKGIRTVLYNRNGNTLNQAREYIAQDLNKKVEQGKIALQDKSSVLANLVFSTALVAIADSELVIETIAEHEQTKLEVLAAIAAVVKPDTLIATNTSSLSLNKLATAVTHSERFIGLHFFNPAPLMKLIEIIPAYFTAHATTERCRQLVAALGKRDVVCQATPGFIVNRMARPYYLEGFRLLEEHVARAPQIDRALKAGGHFRMGPLELTDFIGQDINYQVSRQIWQDMQYDPRYTPGHLQRSLVDAGLLGKKNGRSYFAAEETAPPVTAAIDADVETLRVYGEHPFFTLLQQQAARQWPQLRVEQRPALPSLGPAVQINGAFTVSITDGRTASQLAEQTTADAFVIDIALNYADTAYLVAAHNRYASAANKALFLRLLHTAIPQVEFIKDSPALIVARVLSSLINESVIMVESGVCSREDIDVAAVAGVNYAGGIFDWLGKLGEKNVRTTLSNLAQLLHAARYAPHYTLLHAAQPALTTTP

SEQ ID NO: 40 - protein, 509 aa, Serratia marcescens 2880STDY5683036
MAESNAAIQSAAIIGAGTMGRGIAYLFAQKGIRTVLYNRNGNTLNQAREYIAQDLNKKVEQGKIALQDKGAVLANLVFTSVFETIADSDLVIETIAEQEQTKLEVLAAIAAAVKPDTLLATNTSSLSLNKLATAVTHSERFIGLHFFNPAPLMKLIEIIPAYFTARATTERCRQLVAALGKRDVVCQATPGFIVNRMARPYYLEGFRLLEEHVARAPQIDRALKAGGHFRMGPLELTDFIGQDINYQVSRQIWQDMQYDPRYTPGHLQRSLVDAGLLGKKNGRSYFAAEENALPVTAASNADVETLRVYGEHPFFTLLQQRAALQWPRLRVEQRPALPGLGPAVQINEAFTVSVTDGRTASQLAELTAADAFVVDVALNYADTAYLVAAHNRHASAANKALFLRLLHTAIPQVEFIKDSPALIVARVLSSLINESVIMVESGVCSREDIDVAAVAGVNYADGIFGWLDSLGEKNVRTTLSNLAQLLHAARYAPHYTLLHAAQPVLTTTP

SEQ ID NO: 41 - protein, 509 aa, Serratia marcescens 2880STDY5683034
MAESNAAIQSAAIIGAGTMGRGIAYLFAQKGIRTVLYNRNGNTLNQAREYIAQDLNKKVEQGKIALQDKGAVLANLVFTSVFETIADSELVIETIAEQEQTKLEVLAAIAAAVKPDTLIATNTSSLSLNKLATAVTHSERFIGLHFFNPAPLMKLIEIIPAYFTARATTERCRQLVAALGKRDVVCQATPGFIVNRMARPYYLEGFRLLEEHVARAPQIDRALKAGGHFRMGPLELTDFIGQDINYQVSRQIWQDMQYDPRYTPGHLQRSLVDAGLLGKKNGRSYFAAEENALPVTAATDADVETLRIYGEHPFFTLLQQRAALQWPRLRVEQRPALPGLGPAVQINEAFTVSVTDGRTASQLAELTAADAFVVDVALNYADTAYLVAAHNRHASAANKALFLRLLHTAIPQVEFIKDSPALIVARVLSSLINESVIMVESGVCSREDIDVAAVAGVNYADGIFGWLDNLGEKNVRTTLSNLAQLLHAARYAPHYTLLHAAQPALTTTP

SEQ ID NO: 42 - protein, 509 aa, Serratia marcescens 2880STDY5682892
MAESNAAIQSAAIIGAGTMGRGIAYLFAQKGIRTVLYNRNGNTLNQAREYIAQDLNKKVEQGKIALQDKGAVLANLVFTSVFETIADSDLVIETIAEQEQTKLEVLAAIAAAVKPDTLIATNTSSLSLNKLATAVTHSERFIGLHFFNPAPLMKLIEIIPAYFTARATTERCRQLVAALGKRDVVCQATPGFIVNRMARPYYLEGFRLLEEHVARAPQIDRALKAGGHFRMGPLELTDFIGQDINYQVSRQIWQDMQYDPRYTPGHLQRSLVDAGLLGKKNGRSYFAAEENALPVTAATDADVETLRVYGEHPFFTLLQQRAALQWPRLRVEQRPALPGLGPAVQINEAFTVSVTDGRTASQLAELTAADAFVVDVALNYADTAYLVAAHNRHASAANKALFLRLLHTAIPQVEFIKDSPALIVARVLSSLINESVIMVESGVCSREDIDVAAVAGVNYADGIFGWLDSLGEKNVRTTLSNLAQLLHAARYAPHYTLLHAAQPALTTTP

SEQ ID NO: 43 - protein, 509 aa, Serratia marcescens SM39
MAESNAAIQSAAIIGAGTMGRGIAYLFAQKGIRTVLYNRNGNTLNQAREYIVQDLNKKVEQGKIALQDKGAVLANLVFTSVFETIADSELVIETIAEQEQTKLEVLAAIAAAVKPDTLIATNTSSLSLNKLATAVTHSERFIGLHFFNPAPLMKLIEIIPAYFTARATTERCRQLVAALGKRDVVCQATPGFIVNRMARPYYLEGFRLLEEHVARAPQIDRALKAGGHFRMGPLELTDFIGQDINYQVSRQIWQDMQYDPRYTPGHLQRSLVDAGLLGKKNGRSYFAAEENALPVTAATDADVETLRIYGEHPFFTLLQQRAALQWPRLRVEQRPALPGLGPAVQINEAFTVSVTDGRTASQLAELTAADAFVVDVALNYADTAYLVAAHNRHASAANKALFLRLLHTAIPQVEFIKDSPALIVARVLSSLINESVIMVESGVCSREDIDVAAVAGVNYADGIFGWLDNLGEKNVRTTLSNLAQLLHAARYAPHYTLLHAAQPALTTTP

SEQ ID NO: 44 - protein, 509 aa, Serratia marcescens 189
MAESNAAIQSAAIIGAGTMGRGIAYLFAQKGIRTVLYNRNGNTLNQAREYIAQDLNKKVEQGKIALQDKGAVLANLVFTSVFETIADSDLVIETIAEQEQTKLEVLAAIAAAVKPDTLIATNTSSLSLNKLATAVTHSERFIGLHFFNPAPLMKLIEIIPAYFTARATTERCRQLVAALGKRDVVCQATPGFIVNRMARPYYLEGFRLLEEHVARAPQIDRALKAGGHFRMGPLELTDFIGQDINYQVSRQIWQDMQYDPRYTPGHLQRSLVDAGLLGKKNGRSYFAAEENALPVTAATDADVETLRIYGEHPFFTLLQQRAALQWPRLRVEQRPALPGLGPAVQINEAFTVSVTDGRTASQLAELTAADAFVVDVALNYADTAYLVAAHNRHASAANKALFLRLLHTAIPQVEFIKDSPALIVARVLSSLINESVIMVESGVCSREDIDVAAVAGVNYADGIFGWLDNLGEKNVRTTLSNLAQLLHAARYAPHYTLLHAAQPALTTTP

SEQ ID NO: 45 - protein, 509 aa, Serratia marcescens SMB2099
MAESNAAIQSAAIIGAGTMGRGIAYLFAQKGIRTVLYNRNGNTLNQAREYIAQDLNKKVEQGKIALQDKGAVLANLVFTSVFETIADSDLVIETIAEQEQTKLEVLAAIAAAVKPDTLIATNTSSLSLNKLATAVTHSERFIGLHFFNPAPLMKLIEIIPAYFTARATTERCRQLVAALGKRDVVCQATPGFIVNRMARPYYLEGFRLLEEHVARAPQIDRALKAGGHFRMGPLELTDFIGQDINYQVSRQIWQDMQYDPRYTPGHLQRSLVDAGLLGKKNGRSYFAAEENALPVTAATDADVETLRVYGEHPFFTLLQQRAALQWPRLRVEQRPALPGLGPAVQINEAFTVSVTDGRTASQLAELTAADAFVVDVALNYADTAYLVAAHNRHASEANKALFLRLLHTAIPQVEFIKDSPALIVARVLSSLINESVIMVESGVCSREDIDVAAVAGVNYADGIFGWLDSLGEKNVRTTLSNLAQLLHAARYAPHYTLLHAAQPALTTTP

SEQ ID NO: 46 - protein, 509 aa, Serratia marcescens 2880STDY5682862
MAESNAAIQSAAIIGAGTMGRGIAYLFAQKGIRTVLYNRNGNTLNQAREYIVQDLNKKVEQGKIALQDKGAVLANLVFTSVFETIADSELVIETIAEQEQTKLEVLAAIAAAVKPDTLIATNTSSLSLNKLATAVTHSERFIGLHFFNPAPLMKLIEIIPAYFTARATTERCRQLVAALGKRDVVCQATPGFIVNRMARPYYLEGFRLLEEHVARAPQIDRALKAGGHFRMGPLELTDFIGQDINYQVSRQIWQDMQYDPRYTPGHLQRSLVDAGLLGKKNGRSYFAAEENALPVTAATDADVETLRVYGEHPFFTLLQQRAALQWPRLRVEQRPALPGLGPAVQINEAFTVSVTDGRTASQLAELTAADAFVVDVALNYADTAYLVAAHNRHASAANKALFLRLLHTAIPQVEFIKDSPALIVARVLSSLINESVIMVESGVCSREDIDVAAVAGVNYADGIFGWLDSLGEKNVRTTLSNMAQLLHAARYAPHYTLLHAAQPALMTTP

SEQ ID NO: 47 - protein, 509 aa, Serratia marcescens SE4145
MAESNAEIQSAAIIGAGTMGRGIAYLFAQKGIRTVLYNRNGNTLNQAREYIVQDLNKKVEQGKIALQDKGAVLANLVFTSVFETIADSELVIETIAEQEQTKLEVLAAIAAAVKPDTLIATNTSSLSLNKLATAVTHSERFIGLHFFNPAPLMKLIEIIPAYFTARATTERCRQLVAALGKRDVVCQATPGFIVNRMARPYYLEGFRLLEEHVARAPQIDRALKAGGHFRMGPLELTDFIGQDINYQVSRQIWQDMQYDPRYTPGHLQRSLVDAGLLGKKNGRSYFAAEENALPVTAATDADVETLRIYGEHPFFTLLQQRAALQWPRLRVEQRPALPGLGPAVQINEAFTVSVTDGRTASQLAELTAADAFVVDVALNYADTAYLVAAHNRHASAANKALFLRLLHTAIPQVEFIKDSPALIVARVLSSLINESVIMVESGVCSREDIDVAAVAGVNYADGIFGWLDNLGEKNVRTTLSNLAQLLHAARYAPHYTLLHAAQPALTTTP

SEQ ID NO: 48 - protein, 509 aa, Serratia marcescens 2880STDY5682876
MAESNAAIQSAAIIGAGTMGRGIAYLFAQKGIRTVLYNRNGNTLNQAREYIAQDLNKKVEQGKIALQGKGAVLANLVFTSVFETIADSDLVIETIAEQEQTKLEVLAAIAAAVKPDTLIATNTSSLSLNKLATAVTHSERFIGLHFFNPAPLMKLIEIIPAYFTARATTERCRQLVAALGKRDVVCQATPGFIVNRMARPYYLEGFRLLEEHVARAPQIDRALKAGGHFRMGPLELTDFIGQDINYQVSRQIWQDMQYDPRYTPGHLQRSLVDAGLLGKKNGRSYFAAEENALPVTAATDADVETLRVYGEHPFFTLLQQRAALQWPRLRVEQRPALPGLGPAVQINEAFTVSVTDGRTASQLAELTAADAFVVDVALNYADTAYLVAAHNRHASAANKALFLRLLHTAIPQVEFIKDSPALIVARVLSSLINESVIMVESGVCSREDIDVAAVAGVNYADGIFGWLDSLGEKNVRTTLSNLAQLLHAARYAPHYTLLHAAQPALTTTP

SEQ ID NO: 49 - protein, 509 aa, Serratia marcescens 709
MAESNAAIQSAAIIGAGTMGRGIAYLFAQKGIRTVLYNRNGNTLNQAREYIAQDLNKKVEQGKIALQDKGAVLANLVFTSVFETIADSDLVIETIAEQEQTKLEVLAAIAAAVKPDTLIATNTSSLSLNKLATAVTHSERFIGLHFFNPAPLMKLIEIIPAYFTARATTERCRQLVAALGKRDVVCQATPGFIVNRMARPYYLEGFRLLEEHVARAPQIDRALKAGGHFRMGPLELTDFIGQDINYQVSRQIWQDMQYDPRYTPGHLQRSLVDAGLLGKKNGRSYFAAEENALPVTAATDADVETLRVYDEHPFFTLLQQRAALQWPRLRVEQRPALPGLGPAVQINEAFTVSVTDGRTASQLAELTAADAFVVDVALNYADTAYLVAAHNRHASAANKALFLRLLHTAIPQVEFIKDSPALIVARVLSSLINESVIMVESGVCSREDIDVAAVAGVNYADGIFGWLDSLGEKNVRTTLSNLAQLLHAARYAPHYTLLHAAQPALTTTP

SEQ ID NO: 50 - protein, 509 aa, Serratia marcescens MGH136
MAESNAAIQSAAIIGAGTMGRGIAYLFAQKGIRTVLYNRNGNTLNQAREYIAQDLNKKVEQDKIALQDKGAVLANLVFTSVFETIADSDLVIETIAEQEQTKLEVLAAIAAAVKPDTLIATNTSSLSLNKLATAVTHSERFIGLHFFNPAPLMKLIEIIPAYFTARVTTERCRQLVAALGKRDVVCQATPGFIVNRMARPYYLEGFRLLEEHVARAPQIDRALKAGGHFRMGPLELTDFIGQDINYQVSRQIWQDMQYDPRYTPGHLQRSLVDAGLLGKKNGRSYFAAEENALPVTAATDADVETLRVYGEHPFFTLLQQRAALQWPRLRVEQRPALPGLGPAVQINEAFTVSVTDGRTASQLAELTAADAFVVDVALNYADTAYLVAAHNRHASAANKALFLRLLHTAIPQVEFIKDSPALIVARVLSSLINESVIMVESGVCSREDIDVAAVAGVNYADGIFGWLDSLGEKNVRTTLSNLAQLLHAARYAPHYTLLHAAQPALTTTP

SEQ ID NO: 51 - protein, 509 aa, Serratia marcescens 2880STDY5682884
MAESNAAIQSAAIIGAGTMGRGIAYLFAQKGIRTVLYNRNGNTLNQAREYIAQDLNKKVEQGKIALQDKGAVLANLVFTSVFETIADSELVIETIAEQEQTKLEVLAAIAAAVKPDTLIATNTSSLSLNKLATAVTHSERFIGLHFFNPAPLMKLIEIIPAYFTARATTERCRQLVAALGKRDVVCQATPGFIVNRMARPYYLEGFRLLEEHVARAPQIDRALKAGGHFRMGPLELTDFIGQDINYQVSRQIWQDMQYDPRYTPGHLQRSLVDAGLLGKKNGRSYFAAEENALPVTAATDADVETLRIYGEHPFFTLLQQRATLQWPRLRVEQRPALPGLGPAVQINEAFTVSVTDGRTASQLAELMAADAFVVDVALNYADTAYLVAAHNRHASAANKALFLRLLHTAIPQVEFIKDSPALIVARVLSSLINESVIMVESGVCSREDIDVAAVAGVNYADGIFGWLDSLGEKNVRMTLSNLAQLLHAARYAPHYTLLHAAQPALTTTP

SEQ ID NO: 52 - protein, 509 aa, Serratia marcescens D-3
MAESNAAIQSAAIIGAGTMGRGIAYLFAQKGIRTVLYNRNGNTLNQAREYIAQDLNKKVEQGKIALQDKGAVLANLVFTSVFETIADSDLVIETIAEQEQTKLEVLAAIAAAVKPDTLIATNTSSLSLNKLATAVTHSERFIGLHFFNPAPLMKLIEIIPAYFTARATTERCRQLVAALGKRDVVCQATPGFIVNRMARPYYLEGFRLLEEHVARAPQIDRALKAGGHFRMGPLELTDFIGQDINYQVSRQIWQDMQYDPRYTPGHLQRSLVDAGLLGKKNGRSYFAAEENALPVTAAIDADVETLRVYGEHPFFTLLQQRAALQWPRLRVEQRPALPGLGPAVQINEAFTVSVTDGRTASQLAELTAADAFVVDVALNYADTAYLVAAHNRHASAANKALFLRLLHTAIPQVEFIKDSPALIVARVLSSLINESVIMVESGVCSREDIDVAAVAGVNYADGIFGLLDSLGEKNVRTTLSNLAQLLHAARYAPHYTLLHAAQPALTTTP

SEQ ID NO: 53 - protein, 509 aa, Serratia marcescens 2880STDY5682957
MAESNAAIQSAAIIGAGTMGRGIAYLFAQKGIRTVLYNRNGNTLNQAREYIELDLNKKVEQGKIALQDKGAVLANLVFTSAFETIADSELVIETIAEQEQTKLEVLAAIAAAVKPDTLIATNTSSLSLNKLATAVTHSERFIGLHFFNPAPLMKLIEIIPAYFTARATTERCRQLVAALGKRDVVCQATPGFIVNRMARPYYLEGFRLLEEHVARAPQIDRALKAGGHFRMGPLELTDFIGQDINYQVSRQIWQDMQYDPRYTPGHLQRSLVDAGLLGKKNGRSYFAAEENALPVTAATDADVETLRVYGEHPFFTLLQQRAALQWPRLRVEQRPALPGLGPAVQINEAFTVSVTDGRTASQLAELTAADAFVVDVALNYADTAYLVAAHNRHASAANKALFLRLLHTAIPQVEFIKDSPALIVARVLSSLINESVIMVESGVCSREDIDVAAVAGVNYADGIFGWLDSLGEKNVRTTLSNLAQLLHAARYAPHYTLLHAAQPALTTTP

SEQ ID NO: 54 - protein, 509 aa, Serratia marcescens YDC563
MAESNAAIQSAAIIGAGTMGRGIAYLFAQKGIRTVLYNRNGNTLNQAREYIELDLNKKVEQGKIALQDKGAVLANLVFTSAFETIADSELVIETIAEQEQTKLEVLAAIAAAVKPDTLIATNTSSLSLNKLATAVTHSERFIGLHFFNPAPLMKLIEIIPAYFTARATTERCRQLVAALGKRDVVCQATPGFIVNRMARPYYLEGFRLLEEHVARAPQIDRALKAGGHFRMGPLELTDFIGQDINYQVSRQIWQDMQYDPRYTPGHLQRSLVDAGLLGKKNGRSYFAAEENALPVTAATDADVETLRVYGEHPFFTLLQQRAALQWPRLRVEQRPALPGLGPAVQINEAFTVSVTDGRTASQLAEQTAADAFVVDVALNYADTAYLVAAHNRHASAANKALFLRLLHTAIPQVEFIKDSPALIVARVLSSLINESVIMVESGVCSREDIDVAAVAGVNYADGIFGWLDSLGEKNVRTTLSNMAQLLHAARYAPHYTLLHAAQPALMTTP

SEQ ID NO: 55 - protein, 509 aa, Serratia marcescens 2880STDY5683035
MAESNAAIQSAAIIGAGTMGRGIAYLFAQKGIRTVLYNRNGNTLNQAREYIAQDLNKKVEQGKIALQDKGAVLANLVFTSVFETIADSDLVIETIAEQEQTKLEVLAAIAAAVKPDTLIATNTSSLSLNKLATAVTHSERFIGLHFFNPAPLMKLIEIIPAYFTARATTERCRQLVAALGKRDVVCQATPGFIVNRMARPYYLEGFRLLEEHVARAPQIDRALKAGGHFRMGPLELTDFIGQDINYQVSRQIWQDMQYDPRYTPGHLQRSLVDAGLLGKKNGRSYFAAEENALPVTAAIDADVETLRVYGEHPFFTLLQQRAALQWPRLRVEQRPALPGLGPAVQINEAFTVSVTDGRTASQLAELTAADVFVVDVALNYADTAYLVAAHNRHASAANKALFLRLLHTAIPQVEFIKDSPALIVARVLSSLINESVIMVESGVCSREDIDVAAVAGVNYADGIFGLLDSLGEKNVRTTLSNLAQLLHAARYAPHYTLLHAAQPALTTTP

SEQ ID NO: 56 - protein, 509 aa, Serratia marcescens 2880STDY5682930
MAESNAAIQSAAIIGAGTMGRGIAYLFAQKGIRTVLYNRNGNTLNQAREYIAQDLNKKVEQGKIALQDKGAVLANLVFTSVFETIADSDLVIETIAEQEQTKLEVLAAIAAAVKPDTLIATNTSSLSLNKLATAVTHSERFIGLHFFNPAPLMKLIEIIPAYFTARATTERCRQLVAALGKRDVVCQATPGFIVNRMARPYYLEGFRLLEEHVARAPQIDRALKAGGHFRMGPLELTDFIGQDINYQVSRQIWQDMQYDPRYTPGHLQRSLVDAGLLGKKNGRSYFAAEENALPVTAATDADVETLRVYGEHPFFTLLQQRAALQWPRLRVEQRPALPGLGPAVQINEAFTVSVTDGRTASQLAELTAADAFVVDVALNYADTAYLVAAHNRHASAANKALFLRLLHTAIPQVEFIKDSPALIVARVLSSLINESVIMVESGVCSREDINVAAVAGVNYADGIFGLLDSLGEKNVRTTLSNLAQLLHAARYAPHYTLLHAAQPVLTTTP

SEQ ID NO: 57 - protein, 509 aa, Serratia marcescens 790
MAESNAAIQSAAIIGAGTMGRGIAYLFAQKGIRTVLYNRNGNTLNQAREYIAQDLNKKVEQGKIALRDKGAVLANLVFTSVFETIADSELVIETIAEQEQTKLEVLAAIAAAVKPDTLIATNTSSLSLNKLATAVTHSERFIGLHFFNPAPLMKLIEIIPAYFTARATTERCRQLVAALGKRDVVCQATPGFIVNRMARPYYLEGFRLLEEHVARAPQIDRALKAGGHFRMGPLELTDFIGQDINYQVSRQIWQDMQYDPRYTPGHLQRSLVDAGLLGKKNGRSYFAAEENALPVTAATDADVETLRVYGEHPFFTLLQQRAALQWPRLRVEQRPALPGLGPAVQTNEAFTVSVTDGRTANQLAELTAADAFVVDVALNYADTAYLVAAHNRHASAANKALFLRLLHTAIPQVEFIKDSPALIVARVLSSLINESVIMVESGVCSREDIDVAAVAGVNYADGIFGWLDSLGEKNVRTTLSNMAQLLHAARYAPHYTLLHAAQPALMTTP

SEQ ID NO: 58 - protein, 509 aa, Serratia marcescens UMH5
MAESNAAIQSAAIIGAGTMGRGIAYLFAQKGIRTVLYNRNGNTLSQARDYIELDLNKKVEQGKIALQDKGAVLANLVFTSVFETIADSELVIETIAEQEQTKLEVLATIAAAVKPDTLIATNTSSLSLNKLATAVTHSERFIGLHFFNPAPLMKLIEIIPAYCTAHATTERCRQLVAALGKRDVVCQATPGFIVNRMARPYYLEGFRLLEEHVARAPQIDRALKAGGHFRMGPLELTDFIGQDINYQVSRQIWQDMQYDARYTPGHLQRSLVDAGLLGKKNGRSYFAVEENAPPVMAATDADIETLHVYGEHPFFTLLQQRAALQWPRLRVEQRQALPGLGPAVRINDAFTISITDGRTANQLAEQTAADAFVVDVALNYADTAYLVAAHSRHASGANKALFLRLLHTAIPQVEFIKDSPALIVARVLSSLINESVIMVESGVCSREDIDVAAVAGVNYADGIFGWLDSLGEKNVRTTLSNLAQLLHAARYAPHYTLLHAAQPALTTTP

SEQ ID NO: 59 - protein, 509 aa, Serratia marcescens 2880STDY5682988
MAESNAAIQSAAIIGAGTMGRGIAYLFAQKGIRTVLYNRNGNTLSQARDYIELDLNKKVEQGKIALQDKGAVLANLVFTSVFETIADSELVIETIAEQEQTKLEVLATIAAAVKPDTLIATNTSSLSLNKLATAVTHSERFIGLHFFNPAPLMKLIEIIPAYCTAHATTERCRQLVAALGKRDVVCQATPGFIVNRMARPYYLEGFRLLEEHVARAPQIDRALKAGGHFRMGPLELTDFIGQDINYQVSRQIWQDMQYDARYTPGHLQRSLVDAGLLGKKNGRSYFAVEENAPPVMAATDADIETLHVYGEHPFFTLLQQRAALQWPRLRVEQRQALPGLGPAVRINDAFTISITDGRTANQLAEQTATDAFVVDVALNYADTAYLVAAHSRHASGANKALFLRLLHTAIPQVEFIKDSPALIVARVLSSLINESVIMVESGVCSREDIDVAAVAGVNYADGIFGWLDSLGEKNVRTTLSNLAQLLHAARYAPHYTLLHAAQPALTTTP

SEQ ID NO: 60 - protein, 509 aa, Serratia marcescens 945154301
MAESNAAIQSAAIIGAGTMGRGIAYLFAQKGIRTVLYNRNGNTLNQARDYIELDLNKKVEQGKIALQDKGAVLANLVFTSVFETIADSELVIETIAEQEQTKLEVLAAIAAAVKPDTLIATNTSSLSLNKLATAVTHSERFIGLHFFNPAPLMKLIEIIPAYFTAHATTERCRQLVAALGKRDVVCQATPGFIVNRMARPYYLEGFRLLEEHVARAPQIDRALKAGGHFRMGPLELTDFIGQDINYQVSRQIWQDMQYDARYTPGHLQRSLVDAGLLGKKNGRSYFAAEENAPPVMAATDADIETLHVYGEHPFFTLLQQRAALQWPQLRVEQRPALPGLGPAVRINDAFSVSITDGRTANQLAEQTAADAFVVDVALNYADTAYLVAAHSRHASAANKALFLRLLHTAIPQVEFIKDSPALIVARVLSSLINESVIMVESGVCSREDIDVAAVAGVNYADGIFGWLDSLGEKNVRTTLSNLAQLLHAARYAPHYTLLHAAQPALTTTP

SEQ ID NO: 61 - protein, 509 aa, Serratia marcescens at10508
MAESNAAIQSAAIIGAGTMGRGIAYLFAQKGIRTVLYNRNGNTLNQARDYIELDLNKKVEQGKIALQDKGAVLANLVFTSVFETIADSELVIETIAEQEQTKLEVLAAIAAAVKPDTLIATNTSSLSLNKLATAVTHSERFIGLHFFNPAPLMKLIEIIPAYFTAHATTERCRQLVTALGKRDVVCQATPGFIVNRMARPYYLEGFRLLEEHVARAPQIDRALKAGGHFRMGPLELTDFIGQDINYQVSRQIWQDMQYDARYTPGHLQRSLVDAGLLGKKNGRSYFAVEENAPPVMAATDADIETLHVYGEHPFFTLLQQRAALQWPQLRVEQRPALPGLGPAVRINDAFTVSITDGRTANQLAEQTAADAFVVDVALNYADTAYLVAAHSRHASAANKALFLRLLHTAIPQVEFIKDSPALIVARVLSSLINESVIMVESGVCSREDIDVAAVAGVNYADGIFGWLDSLGEKNVRTTLSNLAQLLHAARYAPHYTLLHAAQPALTTTP

SEQ ID NO: 62 - protein, 509 aa, Serratia marcescens ML2637
MAESNAAIQSAAIIGAGTMGRGIAYLFAQKGIRTVLYNRNGNTLNQARDYIELDLNKKVEQGKIALQDKGAVLANLVFTSVFETIADSELVIETIAEQEQTKLEVLAAIAAAVKPDTLIATNTSSLSLNKLATAVTHSERFIGLHFFNPAPLMKLIEIIPAYFTAHATTERCRQLVTALGKRDVVCQATPGFIVNRMARPYYLEGFRLLEEHVARAPQIDRALKAGGHFRMGPLELTDFIGQDINYQVSRQIWQDMQYDARYTPGHLQRSLVDAGLLGKKNGRSYFAVEENAPPVMAATDADIETLHVYGEHPFFTLLQQRAALQWPQLRVEQRPALPGLGPAVRINDAFTVSITDGRTANQLAEQTAADAFVVDVALNYADTAYLVAAHSRHASAANKALFLRLLHTAIPQVEFIKDSPALIVARVLSSLINESVIMVESGVCSREDIDVAAVAGVNYADGIFGWLDSLGEKNVRTTLSNLAQLLHAARYAPHYTLLHAVQPALTTTP

SEQ ID NO: 63 - protein, 509 aa, Serratia marcescens SM1978
MAESNAAIQSAAIIGAGTMGRGIAYLFAQKGIRTVLYNRNGNTLNQARDYIELDLNKKVEQGKIALQDKGAVLANLVFTSVFETIADSELVIETIAEQEQTKLEVLAAIAAAVKPDTLIATNTSSLSLNKLATAVTHSERFIGLHFFNPAPLMKLIEIIPAYFTAHATTERCRQLVTALGKRDVVCQATPGFIVNRMARPYYLEGFRLLEEHVARAPQIDRALKAGGHFRMGPLELTDFIGQDINYQVSRQIWQDMQYDARYTPGHLQRSLVDAGLLGKKNGRSYFAAEENAPPVMASTDADIETLHVYGEHPFFTLLQQRAALQWPQLRVEQRPALPGLGPAVRINDAFSVSITDGRTANQLAEQTTADAFVVDVALNYADTAYLVAAHSRHASAANKALFLRLLHTAIPQVEFIKDSPALIVARVLSSLINESVIMVESGVCSREDIDVAAVAGVNYADGIFGWLDSLGEKNVRTTLSNLAQLLHAARYAPHYTLLHAAQPALTTTP

SEQ ID NO: 64 - protein, 509 aa, Serratia marcescens PWN146
MAESNAAIQSAAIIGAGTMGRGIAYLFAQKGIRTVLYNRNGNTLNQARDYIELDLNKKVEQGKIALQDKGAVLANLVFTSVFETIADSELVIETIAEQEQTKLEVLATIAAAVKPDTLIATNTSSLSLNKLATAVTHSERFIGLHFFNPAPLMKLIEIIPAYFTAHATTERCRQLVAALGKRDVVCQATPGFIVNRMARPYYLEGFRLLEEHVARAPQIDRALKAGGHFRMGPLELTDFIGQDINYQVSRQIWQDMQYDARYTPGHLQRSLVDAGLLGKKNGRSYFAVEENAPPVMAATDADIETLHVCGEHPFFTLLQQRAALQWPRLRVEQRPALPGLGPAVWINDAFTVSITDGRTANQLAEQTAADAFVVDVALNYADTAYLVAAHSRHASAANKALFLRLLHTAIPQVEFIKDSPALIVARVLSSLINESVIMVESGVCSREDIDVAAVAGVNYADGIFGWLDSLGEKNVRATLSNLAQLLHAARYAPHYTLLHAAQPALTTTP

SEQ ID NO: 65 - protein, 509 aa, Serratia marcescens H1q
MAERNAAIQSAAIIGAGTMGRGIAYLFAQKGIRTVLYNRNGNTLIQAREYIVQDLDKKVEQGRLAPQDKDAVLANLQFSSVFEAIVDSDLVLETIAEQEQAKLEVLAAIAAAVKPDTLIATNTSSLSLNKLATAVTHSERFIGLHFFNPAPLMKLIEIIPAYFTAQATTETCRQLVAALGKRDVVCQATPGFIVNRMARPYYLEGFRLLEEHVARAPQIDRALKAGGHFRMGPLELTDFIGQDINYQVSRQIWQDMQYDPRYTPGHLQRSLVDAGLLGKKNGRSYFSAEETAPPVEAAVEADVETLRIYGEHPLFTLLQQRAALQWPQLRVEQRPALSGLGAAIQVNDAFTVSITDGRTANQLAEQTAADAFVVDVALNYADTAYLVAAHSRHASAANKALFLRLLHTALPQVEFIKDSPALIVARVLSSLINESVIMVESGVCSREDIDVAAVAGVNYADGIFGWLTRLGEKNVRTTLSNLAQLLHAARYAPHYTLLHAAQPALTTTP

SEQ ID NO: 66 - protein, 509 aa, Serratia marcescens UMH6
MAESNAAIQSAAIIGAGTMGRGIAYLFAQKSIRTVLYNRNGNTLNQARDAIVQDLNKKVEQGKLALQDKDAVLANLTFSAEFGAIADSDLVIETIAEHEQAKLEVLAAIAATVKPDTLIATNTSSLSLNKLATAVTHSERFIGLHFFNPAPLMKLIEIIPAYFTAQVTTERCRQLVAALGKRDVVCQATPGFIVNRMARPYYLEGFRLLEEHVARAPQIDRALKAGGHFRMGPLELTDFIGQDINYQVSRQIWQDMQYDPRYTPGHLQRSLVDAGLLGKKNGRSYFSAEESPPPLAAAVDAEVETLRIYGEHPLFTLLQQRAALQWPRLRVEQRPTLPGLGAAIQVNDAFTVSVTDGRTANQLAEQTAADAFVVDVALNYGDTAYLVAAHSRHASAANKALFLRLLHTAIPQVEFIKDSPALIVARVLSSLINESVIMVESGVCSREDIDVAAVAGVNYADGIFGWLTRLGEENVRTTLSNLAQLLHAARYAPHYTLLHAAQPALTTTP

SEQ ID NO: 67 - protein, 509 aa, Serratia nematodiphila WCU338
MAESNAAIQSAAIIGAGTMGRGIAYLFAQKSIRTVLYNRNGNTLNQARDAIVQDLNKKVEQGKLALQDKDAVLANLTFSAEFGAIADSDLVIETIAEHEQAKLEVLAAIAATVKPDTLIATNTSSLSLNKLATAVTHSERFIGLHFFNPAPLMKLIEIIPAYFTAQITTERCRQLVAALGKRDVVCQATPGFIVNRMARPYYLEGFRLLEEHVARAPQIDRALKAGGHFRMGPLELTDFIGQDINYQVSRQIWQDMQYDPRYTPGHLQRSLVDAGLLGKKNGRSYFSAEESPPPLAAAVDAEVETLRIYGEHPLFTLLQQRAALQWPRLRVEQRPTLPGLGAAIQVNDAFTVSVTDGRTANQLAEQTAADAFVVDVALNYGDTAYLVAAHSRHASAANKALFLRLLHTAIPQVEFIKDSPALIVARVLSSLINESVIMVESGVCSREDIDVAAVAGVNYADGIFGWLTRLGEENVRTTLSNLAQLLHAARYAPHYTLLHAAQPALTTTP

SEQ ID NO: 68 - protein, 509 aa, Serratia sp. OLEL1
MAESNAAIQSAAIIGAGTMGRGIAYLLAQKSIRTVLYNRNGNTLNQARDAIVQDLNKKVEQGKLALQDKDAVLANLTFSAEFGAIADSDLVIETIAEHEQAKLEVLAAIAATVKPDTLIATNTSSLSLNKLATAVTHSERFIGLHFFNPAPLMKLIEIIPAYFTAQVTTERCRQLVAALGKRDVVCQATPGFIVNRMARPYYLEGFRLLEEHVARAPQIDRALKAGGHFRMGPLELTDFIGQDINYQVSRQIWQDMQYDPRYTPGHLQRSLVDAGLLGKKNGRSYFSAEESPPPLAAAVDAEVETLRIYGEHPLFTLLQQRAALQWPRLRVEQRPTLPGLGAAIQVNDAFTVSVTDGRTANQLAEQTAADAFVVDVALNYGDTAYLVAAHSRHASAANKALFLRLLHTAIPQVEFIKDSPALIVARVLSSLINESVIMVESGVCSREDIDVAAVAGVNYADGIFGWLTRLGEENVRTTLSNLAQLLHAARYAPHYTLLHAAQPALTTTP

SEQ ID NO: 69 - protein, 509 aa, Serratia marcescens 7209
MAESNAAIQSAAIIGAGTMGRGIAYLFAQKSIRTVLYNRNGNTLNQARDAIVQDLNKKVEQGKLALQDKDAVLANLTFSAEFGVIADSDLVIETIAEHEQAKLEVLAAIAATVKPDTLIATNTSSLSLNKLATAVTHSERFIGLHFFNPAPLMKLIEIIPAYFTAQVTTERCRQLVAALGKRDVVCQATPGFIVNRMARPYYLEGFRLLEEHVARAPQIDRALKAGGHFRMGPLELTDFIGQDINYQVSRQIWQDMQYDPRYTPGHLQRSLVDAGLLGKKNGRSYFSAEESPPPLAAAVDAEVETLRIYGEHPLFTLLQQRAALQWPRLRVEQRPTLPGLGAAIQVNDAFTVSVTDGRTANQLAEQTAADAFVVDVALNYGDTAYLVAAHSRHASAANKALFLRLLHTAIPQVEFIKDSPALIVARVLSSLINESVIMVESGVCSREDIDVAAVAGVNYADGIFGWLTRLGEENVRTTLSNLAQLLHAARYAPHYTLLHAAQPALTTTP

SEQ ID NO: 70 - protein, 509 aa, Serratia marcescens sicaria (Ss1)
MAESNAAIQSAAIIGAGTMGRGIAYLFAQKSIRTVLYNRNGNTLNQARDAIVQDLNKKVEQGKLALQDKDAVLANLTFSAEFGAIADSDLVIETIAEHEQAKLEVLAAIAATVKPDTLIATNTSSLSLNKLATAVTHSERFIGLHFFNPAPLMKLIEIIPAYFTAQVTTERCRQLVAALGKRDVVCQATPGFIVNRMARPYYLEGFRLLEEHVARAPQIDRALKAGGHFRMGPLELTDFIGQDINYQVSRQIWQDMQYDPRYTPGHLQRSLVDAGLLGKKNGRSYFSTEESPPPLAAAVDAEVETLRIYGEHPLFTLLQQRAALQWPRLRVEQRPTLPGLGAAIQVNDAFTVSVTDGRTANQLAEQTAADAFVVDVALNYGDTAYLVAAHSRHASAANKALFLRLLHTAIPQVEFIKDSPALIVARVLSSLINESVIMVESGVCSREDIDVAAVAGVNYADGIFGWLTRLGEENVRTTLSNLAQLLHAARYAPHYTLLHAAQPALTTTP

SEQ ID NO: 71 - protein, 509 aa, Serratia sp. OLFL2
MAESNAAIQSAAIIGAGTMGRGIAYLLAQKSIRTVLYNRNGNTLNQARDAIVQDLNKKVEQGKLALQDKDAVLANLTFSAEFGAIADSDLVIETIAEHEQAKLDVLAAIAATVKPDTLIATNTSSLSLNKLATAVTHSERFIGLHFFNPAPLMKLIEIIPAYFTAQVTTERCRQLVAALGKRDVVCQATPGFIVNRMARPYYLEGFRLLEEHVARAPQIDRALKAGGHFRMGPLELTDFIGQDINYQVSRQIWQDMQYDPRYTPGHLQRSLVDAGLLGKKNGRSYFSAEESPPPLAAAVDAEVETLRIYGEHPLFTLLQQRAALQWPRLRVEQRPTLPGLGAAIQVNDAFTVSVTDGRTANQLAEQTAADAFVVDVALNYGDTAYLVAAHSRHASAANKALFLRLLHTAIPQVEFIKDSPALIVARVLSSLINESVIMVESGVCSREDIDVAAVAGVNYADGIFGWLTRLGEENVRTTLSNLAQLLHAARYAPHYTLLHAAQPALTTTP

SEQ ID NO: 72 - protein, 509 aa, Serratia marcescens BIDMC 81
MAESNAAIQSAAIIGAGTMGRGIAYLLAQKSIRTVLYNRNGNTLNQARDAIVQDLNKKVEQGKLALQDKDAVLANLTFSAEFGAIADSDLVIETIAEHEQAKLEVLAAIAATVKPDTLIATNTSSLSLNKLATAVTHSERFIGLHFFNPAPLMKLIEIIPAYFTAQVTTERCRQLVAALGKRDVVCQATPGFIVNRMARPYYLEGFRLLEEHVARAPQIDRALKAGGHFRMGPLELTDFIGQDINYQVSRQIWQDMQYDPRYTPGHLQRSLVDAGLLGKKNGRSYFSAEESPPPLAAAVDAEVETLRIYGEHPLFTLLQQRAALQWPRLRVEQRPTLPDLGAAIQVNDAFTVSVTDGRTANQLAEQTAADAFVVDVALNYGDTAYLVAAHSRHASAANKALFLRLLHTAIPQVEFIKDSPALIVARVLSSLINESVIMVESGVCSREDIDVAAVAGVNYADGIFGWLTRLGEENVRTTLSNLAQLLHAARYAPHYTLLHAAQPALTTTP

SEQ ID NO: 73 - protein, 509 aa, Serratia marcescens BIDMC 50
MAESNAAIQSAAIIGAGTMGRGIAYLFAQKSIRTVLYNRNGNTLNQARDAIVQDLNKKVEQGKLALQDKDVVLANLTFSAEFGAIADSDLVIETIAEHEQAKLEVLAAIAATVKPDTLIATNTSSLSLNKLATAVTHSERFIGLHFFNPAPLMKLIEIIPAYFTAQVTTERCRQLVAALGKRDVVCQATPGFIVNRMARPYYLEGFRLLEEHVARAPQIDRALKAGGHFRMGPLELTDFIGQDINYQVSRQIWQDMQYDPRYTPGHLQRSLVDAGLLGKKNGRSYFSAEESPPPLAAAVDAEVETLRIYGEHPLFTLLQQRAALQWPRLRVEQRPTLPDLGAAIQVNDAFTVSVTDGRTANQLAEQTAADAFVVDVALNYGDTAYLVAAHSRHASAANKALFLRLLHTAIPQVEFIKDSPALIVARVLSSLINESVIMVESGVCSREDIDVAAVAGVNYADGIFGWLTRLGEENVRTTLSNLAQLLHAARYAPHYTLLHAAQPALTTTP

SEQ ID NO: 74 - protein, 509 aa, Serratia marcescens UMH7
MAESNAAIQSAAIIGAGTMGRGIAYLLAQKSIRTVLYNRNGNTLNQARDAIVQDLNKKVEQGKLALQDKDTVLANLTFSAEFGAIADSDLVIETIAEHEQAKLEVLAAIAATVKPDTLIATNTSSLSLNKLATAVTHSERFIGLHFFNPAPLMKLIEIIPAYFTAQVTTERCRQLVAALGKRDVVCQATPGFIVNRMARPYYLEGFRLLEEHVARAPQIDRALKAGGHFRMGPLELTDFIGQDINYQVSRQIWQDMQYDPRYTPGHLQRSLVDAGLLGKKNGRSYFSAEESPPPLAAAVDAEVETLRIYGEHPLFTLLQQRATLQWPRLRVEQRPTLPGLGAAIQVNDAFTVSVTDGRTANQLAEQTAADAFVVDVALNYGDTAYLVAAHSRHASAANKALFLRLLHTAIPQVEFIKDSPALIVARVLSSLINESVIMVESGVCSREDIDVAAVAGVNYADGIFGWLTRLGEENVRTTLSNLAQLLHAARYAPHYTLLHAAQPALTTTP

SEQ ID NO: 75 - protein, 509 aa, Serratia marcescens RSC-14
MAESNAAIQSAAIIGAGTMGRGIAYLLAQKSIRTVLYNRNGNTLNQARDAIVQDLNKKVEQGKLALQDKDAVLANLTFSTEFGAIADSDLVIETIAEHEQAKLEVLAAIAATVKPDRLIATNTSSLSLNKLATAVTHSERFIGLHFFNPAPLMKLIEIIPAYFTAQVTTERCRQLVAALGKRDVVCQATPGFIVNRMARPYYLEGFRLLEEHVARAPQIDRALKAGGHFRMGPLELTDFIGQDINYQVSRQIWQDMQYDPRYTPGHLQRSLVDAGLLGKKNGRSYFSAEESPPPLAAAVDAEVETLRIYGEHPLFTLLQQRAALQWPRLRVEQQPTLPGLGAAIQVNDAFTVSVTDGRTANQLAEQTAADAFVVDVALNYGDTAYLVAAHSRHASAANKALFLRLLHTAIPQVEFIKDSPALIVARVLSSLINESVIMVESGVCSREDIDVAAVAGVNYADGIFGWLTRLGEENVRTTLSNLAQLLHAARYAPHYTLLHAAQPALTTTP

SEQ ID NO: 76 - protein, 509 aa, Serratia marcescens SM03
MAERNAAIQSAAIIGAGTMGRGIAYLFAQKGIRTVLYNRNGNTLIQAREYIVQDLDKKVEQGRLAPQDKDAVLANLQFSSVFEAIVDSDLVLETIAEQEQAKLEVLAAIAAAVKPDTLIATNTSSLSLNKLATAVTHSERFIGLHFFNPAPLMKLIEIIPAYFTAQATTETCRQLVAALGKRDVVCQATPGFIVNRMARPYYLEGFRLLEEHVARAPQIDRALKAGGHFRMGPLELTDFIGQDINYQVSRQIWQDMQYDPRYTPGHLQRSLVDAGLLGKKNGRSYFSAEETAPPVEAAAEADVETLRIYGEHPLFTLLQQRAALQWPQLRVEQRPALSGLGAAIQVNDAFTVSVTDGRTANQLAEQTAADAFVVDVALNYADTAYLVAAHSRHASAANKALFLRLLHTALPQVEFIKDSPALIVARVLSSLINESVIMVESGVCSREDIDVAAVAGVNYADGIFGWLTRLGEKNVRTTLSNLAQLLHAARYAPHYTLLHAAQPALTTTP

SEQ ID NO: 77 - protein, 509 aa, Serratia marcescens 90-166
MAESNAAIQSAAIIGAGTMGRGIAYLFAQKGIRTVLYNRNGNTLIQAREYIVQDLDKKIEQGRVAPQDKDAVLANLTFSAEFGAIVDSDLVIETIAEHEQAKLEVLAAIAATVKPDTLIATNTSSLSLNKLATAVTHSERFIGLHFFNPAPLMKLIEIIPAYFTAQVTTERCRQLVAALGKRDVVCQATPGFIVNRMARPYYLEGFRLLEEHVARAPQIDRALKAGGHFRMGPLELTDFIGQDINYQVSRQIWQDMQYDPRYTPGHLQRSLVDAGLLGKKNGRSYFSAEESPPPLAAAVDAEIETLRIYGEHPLFTLLQQRAALQWPRLRVEHRPTLPGLGAAIQVNDAFTVSVTDGRTANQLAEQTAADAFVVDVALNYGDTAYLAAAHSRHASAANKALFLRLLHTAIPQVEFIKDSPALIVARVLSSLINESVIMVESGVCSREDIDVAAVAGVNYADGIFVWLTRLGEENVRTTLSNLAQLLHAARYAPHYTLLHAAQPALTSTP

SEQ ID NO: 78 - protein, 509 aa, Serratia marcescens UMH2
MAESNAAIQSAAIIGAGTMGRGIAYLLAQKSIRTVLYNRNGNTLNQARDAIVQDLNKKVEQGKLALQDKDAVLANLTFSTEFGAIADSDLVIETIAEHEQAKLEVLAAIAATVKPDTLIATNTSSLSLNKLATAVTHSERFIGLHFFNPAPLMKLIEIIPAYFTAQVTTERCRQLVAALGKRDVVCQATPGFIVNRMARPYYLEGFRLLEEHVARAPQIDRALKAGGHFRMGPLELTDFIGQDINYQVSRQIWQDMQYDPRYTPGHLQRSLVDAGLLGKKNGRSYFSAEESPPPLAAAVDAEVEALRIYGEHPLFTLLQQRAALQWPRLRVEQRPTLPGLGAAIQVNDAFTVSVTDGRTANQLAEQTAADAFVVDVALNYGDTAYLVAAHSRHASAANKALFLRLLHTAIPQVEFIKDSPALIVARVLSSLINESVIMVESGVCSREDIDVAAVAGVNYADGIFGWLTHLGEENVRTTLSNLAQLLHAARYAPHYTLLHAAQPALTTTP

SEQ ID NO: 79 - protein, 509 aa, Serratia plymuthica AS9
MAENNSAIRSAAVIGAGTMGRGIAYLLALNGIRTVLYNRNGNNLNQARDYIVSDLDRKMDNGKITLQKKGQILANIIFSAVFDAITDSDLVIETIAEDEQTKHEILAAIAATVKPEAIIATNTSSLSLNKLAAGVENNPRFIGLHFFNPAPLMKLIEIIPSYFTSHTTSLRCQQLVIALGKQFVVCKATPGFIVNRMARPFYLEGFRLLEENVAQAPQIDRALKAGGHFRMGPLELTDFIGQDINYQVSKQIWQDMQFDSRYTPGHLQRSLVDAGLLGRKNGRSFFASLPATPPTPATESDTPTSLHFYGEHALFDHLQQRALATWPALRVQRLPERPELGRLILVNNTLAIKITDGRTANLLAGLTALDTFVIDAALNYADTAYLVAAHNQHATEANKALFLSLLQTVIAQVEFIKDSPALIVARVLSSLINESVIMVESGVCSRADIDIAAVAGVNYADGIFAWLAQLGQKNVKSTLDNMAQLLHSARYYPHYSLLNAARPELAVAP

SEQ ID NO: 80 - protein, 509 aa, Serratia plymuthica tumat 205
MAENNSAIRSAAVIGAGTMGRGIAYLLALNGIRTVLYNRNGNNLNQARDYIVSDLDRKIDNGKITLQKKGQILANIIFSAVFDAITDSDLVIETIAEDEQTKHEILAAIAATVKPEAIIATNTSSLSLNKLAAGVENNPRFIGLHFFNPAPLMKLIEIIPSYFTSHATSLRCQQLVIALGKQFVVCKATPGFIVNRMARPFYLEGFRLLEENVALAPQIDRALKAGGHFRMGPLELTDFIGQDINYQVSKQIWQDMQFDPRYTPGHLQRSLVDAGLLGRKNGRSFFASQPVTPPTPTTESDTPTSLHFYGEHALFDHLQQRALATWPALRVQRLPERPELGRFILVNNAMAIKITDGRTANLLAGLTALDTFVIDAALNYADTAYLVAAHNQHATETNKALFLTLLQTVIAQVEFIKDSPALIVARVLSSLINESVIMVESGVCSRADIDIAAVAGVNYADGIFAWLAQLGQKNVKSTLDNMAQLLHSARYYPHYSLLNAARPELAVAP

SEQ ID NO: 81 - protein, 509 aa, Serratia plymuthica A30
MAENNSAIRSAAVIGAGTMGRGIAYLLALNGIRTVLYNRNGNNLNQARDYIVSDLDRKIDNGKITLQKKGQILANIIFSAVFDAITDSDLVIETIAEDEQTKHEILAAIAATVKPEAIIATNTSSLSLNKLAAGVENNPRFIGLHFFNPAPLMKLIEIIPSYFTSHATSLRCQKLVIALGKQFVVCKATPGFIVNRMARPFYLEGFRLLEENVALAPQIDRALKAGGHFRMGPLELTDFIGQDINYQVSKQIWQDMQFDPRYTPGHLQRSLVDAGLLGRKNGRSFFASQPATPPNPTTEGDTPTSLHFYGEHALFDHLQQRALATWPALRVQRLPERPELGRFILMNNRLAIKITDGRTANLLAGLTALDTFVIDAALNYADTAYLVAAHNQHATETNKALFLTLLQTLIAQVEFIKDSPALIVARVLSSLINESVIMVESGVCSRADIDIAAVAGVNYADGIFAWLAQLGQKNVKSTLDNMAQLLHSARYYPHYSLLNAARPELAVAP

SEQ ID NO: 82 - protein, 509 aa, Serratia plymuthica 4Rx13
MAENNSAIRSAAVIGAGTMGRGIAYLLALNGIRTVLYNRNGNSLNQARDYIVSDLDRKIDNGKITLQKKGQILANIIFSAVFDAITDSDLVIETIAEDEQTKHEILAAIAATVKPEAIIATNTSSLSLNKLAAGVENNPRFIGLHFFNPAPLMKLIEIIPSYFTSHATSLRCQKLVIALGKQFVVCKATPGFIVNRMARPFYLEGFRLLEENVALAPQIDRALKAGGHFRMGPLELTDFIGQDINYQVSKQIWQDMQFDPRYTPGHLQRSLVDAGLLGRKNGRSFFASQPATPPTPTTESDTPTSLHFYGEHALFDHLQQRALATWPALSVQRLPERPELGRFILVNNALAIKITDGRTANLLAGLTALDTFVIDAALNYADTAYLVAAHNQHATETNKALFLTLLQTVIAQVEFIKDSPALIVARVLSSLINESVIMVESGVCSRADIDIAAVAGVNYADGIFAWLAQLGQKNVKSTLDNMAQLLHSARYYPHYSLLNAARPELAVAP

SEQ ID NO: 83 - protein, 509 aa, Serratia plymuthica V4
MAENNSAIRSAAVIGAGTMGRGIAYLLALNGIRTVLYNRNGNNLNQARDYIVSDLDRKIDNGKITLQKKGQILANIIFSAVFDAITDSDLVIETIAEDEQTKHEILAAIAATVKPEAIIATNTSSLSLNKLAAGVENNPRFIGLHFFNPAPLMKLIEIIPSYFTSHATSLRCQKLVIALGKQFVVCKATPGFIVNRMARPFYLEGFRLLEENVALAPQIDRALKAGGHFRMGPLELTDFIGQDINYQVSKQIWQDMQFDPRYTPGHLQRSLVDAGLLGRKNGRSFFASQPATPPTPTTESDTPTSLHFYGEHALFDHLQQRALATWPALRVQRLPERPELGRFILVNNRLAIKITDGRTANLLAGLTALDTFVIDAALNYADTAYLVAAHNQHATETNKALFLTLLQTVIAQVEFIKDSPALIVARVLSSLINESVIMVESGVCSRADIDIAAVAGVNYADGIFAWLAQLGQKNVKSTLDNMAQLLHSARYYPHYSLLNAARPELAVAP

SEQ ID NO: 84 - protein, 509 aa, Serratia plymuthica 3Rp8
MAENNSAIRSAAVIGAGTMGRGIAYLLALNGIRTVLYNRNGNNLNQARDYIVSDLDRKIDNGKITLQKKGQILANIIFSAVFDAITDSDLVIETIAEDEQTKHEILAAIAATVKPEAIIATNTSSLSLNKLAAGVENNPRFIGLHFFNPAPLMKLIEIIPSYFTSHATSLRCQKLVIALGKQFVVCKATPGFIVNRMARPFYLEGFRLLEENVALAPQIDRALKAGGHFRMGPLELTDFIGQDINYQVSKQIWQDMQFDPRYTPGHLQRSLVDAGLLGRKNGRSFFASQPATPPTPTTESDTPTSLHFYGEHALFDHLQQRALATWPALRVQRLPERPELGRFILVNNRLAIKITDGRTANLLAGLTALDTFVIDAALNYADTAYLVAAHNQHATETNKALFLTLLQTLIAQVEFIKDSPALIVARVLSSLINESVIMVESGVCSRADIDIAAVAGVNYADGIFAWLAQLGQKNVKSTLDNMAQLLHSARYYPHYSLLNAARPELAVAP

SEQ ID NO: 85 - protein, 509 aa, Serratia proteamaculans MFPA44A14
MAENNSAIHSVAVIGAGTMGRGIAYLLAQNGIRTLLYNRSGNNLDQARDYIIRDLDKKIDNGKISPQKKGEVLANLVFSPIFDAIADSDLVIETIAEHETTKHEILAAIAATVKQEAIIATNTSSLSLNKLAAGVENNARFIGLHFFNPAPLMKLIEIIPSYFTSRATSLRCQQLVTALGKQFVVCKATPGFIVNRMARPFYLEGFRLLEENVALAPQIDRALKAGGHFRMGPLELTDFIGQDINYQVSSQIWQDMQYDPRYTPGHLQRSLVDAGLLGKKNGRSFFAAPSAESNLLDAGNGTLTSLHFYGEHTLFDLLQQRALATWPTLQIIHQPERPTLGRFIRVNDALAVKITDGRTANLLAELTDLDTFVIDAALNYSDTTYLVAAHNQDAAEANKALFLSLLQTLIPQVEFIKDSPGLIVARVLSSLINESVIMVESGVCSRADIDIAAVAGVNYADGIFAWLTQLGQKNVKSTLDNMAQLLHSARYYPHYSLLNIPRPELAVAP

SEQ ID NO: 86 - protein, 509 aa, Serratia plymuthica A153
MAENNSAIRSAAVIGAGTMGRGIAYLLALNGIRTVLYNRNGNNLNQARDYIVSDLDRKIDNGKITLQKKGQILANIIFSDVFDAITDSDLVIETIAEDEQTKHEILAAIAATVKPEAIIATNTSSLSLNKLAAGVENNPRFIGLHFFNPAPLMKLIEIIPSYFTSRATSLRCQQLVTALGKLFVVCKATPGFIVNRMARPFYLEGFRLLEENVALAPQIDRALKAGGHFRMGPLELTDFIGQDINYQVSKQIWQDMQFDPRYTPGHLQRSLVDAGLLGRKNGRSFFASQPATPPNPTTEGHTPTSLLFYGEHALFDHLQQRALATWPALRVQRLPERPELGRFILVNNRLAIKITDGRTANLLAGLTALDTFVIDAALNYADTAYLVAAHNQHATEPNKALFLTLLQTLIAQVEFIKDSPALIVARVLSSLINESVIMVESGVCSRADIDIAAVAGVNYADGIFAWLAQLGQKNVKSTLDNMAQLLHSTRYYPHYSLLNAARPELAVAP

SEQ ID NO: 87 - DNA, 1530 bp, Serratia marcescens ATCC13880
atggcagaaagtaatgcggcaattcaatcggctgcgattatcggcgcgggaacgatgggcagaggcatcgcttatcttttcgcgcaaaaaggcattcgcacggtgctttataatcgcaacggcaataccctcaatcaggctcgcgaatatatcgcgcaagacctgaacaagaaagtcgaacagggcaagatcgcgctgcaggataaaggcgcggtgctggccaatctaatgttcacttcagtgtttgaggccatcgccgacagcgagctggtgatagaaaccatcgccgagcaagaacaaaccaaacttgaggtgctggcggccatcgccgcggtggtcaagcccgacacgctgatcgccaccaatacctcctcactgtcgcttaacaagctggctactgcggtgacgcacagcgaacgctttatcggtttgcattttttcaaccccgcgccgctgatgaagctgattgaaatcattccggcctactttaccgcgcacgccaccaccgaacgctgccgccaactggtggcggcgttggggaaacacgatgtcgtctgccaggccacgccggggttcatcgtcaatcgcatggcccgcccctactacctggaagggttccgcctgttggaagaacacgtggcgcgcgcggctcagatcgaccgcgccctcaaggccggcgggcgcttccgcatggggccgctcgagctgaccgattttatcggccaagacatcaactatcaggtcagtcggcaaatctggcaggatatgcaatacgacccgcgctatacccccggtcatctgcagcgttcactggtcgatgccggtctgttggggaaaaagaacggccgctcctattttgccgccgaagaaaccgccccgccggtgacggccgccagcaatgcagacgtcgagacgctgcgcgtttacggcgagcaccctttttttaccctgttacagcagcgagccgcgcttcagtggccacagctgcgcgtggaacaacggccggcattaccggggctggggtcggccgtccagatcaatgacgctttcaccgtcagcatcaccgatggccgcacggcgagccaactggccgagcagacggcagcggatgcctttgtggtcgatgtcgccctgaactacgccgacacgacgtatctggcggcggcgcacagccgccacgcctctgcggccaataaggcgctgtttttacgcctgctgcacacggcaatcccgcaggttgaatttatcaaggactctccggcgcttatcgtcgcccgcgtcctcagcagcctgatcaatgagtcggtgatcatggtggaaagcggcgtctgcagccgggaagacatcgatgtcgccgccgtcgcgggcgttaactacgccggcggcattttcgactggctcggcaaactgggggagaaaaacgtcaggacaacgctgagcaatctggctcagctgctgcacgcggcgcgctatgcgccgcattacacccttctgcacgccgcgcaaccggcgctgacgaccacgccttaa

SEQ ID NO: 88 - DNA, 1530 bp, Serratia nematodiphila DSM21420
atggcagaaagtaatgcggcaattcaatcggctgcgattatcggcgcgggaacgatgggcagaggcatcgcttatcttttcgcgcaaaaaggcattcccacgatgctttataatcgcaacggcaataccctcaatcaagctcgcgaatatatcgcgcaagacctgaataagaaagtcgaacagggcaagatcgcgctgcgggataaagacgcggtgctggccaatctgatgttcacttccgtgtttgaggccatcgccgacagcgagctggtgatagaaaccatcgccgagcaagaacaaaccaaacttgaggtgctggcggccatcgccgcagtggtcaagcccgacacgctgatcgccaccaatacctcctcactgtcgctcaacaagctggcaacggcggtaacgcacagcgaacgctttatcggtttgcattttttcaaccccgcgccgctgatgaagctgattgaaatcattccggcctactttaccgcgcacgccaccacggaacgctgccgccaactggtggcggcgttggggaaacgcgatgtcgtctgccaggccacgccggggttcatcgtcaatcgcatggcccgcccctactacctggaagggttccgcctgttggaagaacatgtggcgcgcgcggcgcagatcgaccgcgccctcaaagccggcgggcgcttccgcatggggccgctcgagctgaccgattttatcggccaagacatcaactatcaggtcagccggcaaatctggcaggacatgcaatacgacccgcgctatacccctggtcatctgcagcgttcactggtcgatgccggtctgttggggaaaaagaacggccgctcctattttgccgccgaagaaaccgccccgccggtgacggccgccaacaatgcagacgtcgagacgctgcgcgtttacggcgagcatcctttttttaccctgttgcagcagcgagccgcgcttcagtggccacagctgcgcgtggaacaacggccggcattaccggggctgggagcggccgtccagatcaatgacgctttcaccgtcagcatcaccgatggccgcacggcgagccaactggccgagcagacggcagcggatgcctttgtggtcgatctcgccctgaactacgccgacaccacgtatctggtggcggcgcacagccgccacgcttctgcggccaataaggcgctgtttttacgcctgctgcacacggcaatccctcaggttgaatttatcaaggactctccggcgcttatcgtcgcccgcgtcctcagcagcctgatcaatgagtcggtgatcatggtggaaagcggcgtctgcagccgggaagacatcgatgtcgccgccgtcgcgggcgttaactacgccggcggcattttcgactggctcggcaaactgggggagaaaaacgtcaggacgacgctgagcaatctggcgcagctgctgcacgcggcgcgctatgcgccgcattacacccttctgcacgccgcgcaaccggcgctgacgaccacgccttaa

SEQ ID NO: 89 - DNA, 1530 bp, Serratia plymuthica NBRC102599
atggcagagaataattcggcaatccgttcagccgccgttattggtgcggggaccatgggcagaggcatcgcctatctcctggcgctgaacggcatacgaaccgtactttataatcgcaatggtaataatctcaatcaggcccgtgactatattgtcagcgacctggacagaaaaatagataacggaaaaataaccctgcagaaaaaaggccagatattagccaatattattttctcggacgtctttgacgccataaccgacagcgatctggtgattgaaaccattgcggaagatgagcaaaccaagcatgaaatcctggcagccattgcggcgacggtaaaaccggaggcgatcattgcgaccaatacttcctctctgtcgctgaacaaactggcggcgggggtggaaaacaacccgcgctttatcggcctgcattttttcaatccggcgccgctgatgaagttgatcgaaattattccctcttatttcacctctcgcgccaccagtctacgctgccagcagttggtaacagcgttgggtaaacagtttgtggtctgcaaagccacgccgggctttattgttaaccgcatggcgcggcctttctatctggaagggttccggctgctggaggaaaacgtggcgctggcgccacagatcgaccgcgccctcaaggccggcgggcattttcgcatggggcctttagaactgactgattttatcggccaggatatcaactatcaggtcagcaagcagatttggcaggatatgcagttcgatccccgctatacccccggccatttgcaacgctcgctggtggatgccgggctgctggggaggaaaaacgggcgctctttttttgcttcccaacctgctacaccacccaacccaaccacagagggcgacacgccaacttcactgcatttttatggtgaacacgctttattcgatcacctgcaacagcgcgctttggccacctggcctgcgctgcgcgttcagcggttgccggaacggccggaactggggcgttttatcctggtgaataacaggctggcgatcaaaatcactgatggcagaacggcgaacctgctcgccggcttaaccgctctcgacaccttcgtgattgacgccgcgctgaactacgccgacaccgcctatctggtggccgcccacaatcaacatgccacagagacgaataaagcgctgtttctgacgctgctgcaaaccctcatcgctcaggtggagtttattaaagattcccctgccctgatcgttgcccgcgtactgagcagcctgatcaatgaatcggtgatcatggtggagagcggcgtttgcagccgggcagatatcgatatcgccgccgtggccggcgtgaactatgccgacggcatttttgcctggttggcgcagctcgggcagaaaaacgtgaaatcgacgctggataacatggcgcaattgctgcactccacgcgctattacccgcattactcattgctgaacgcggcccggcctgagctggctgtagcgccctaa

SEQ ID NO: 90 - DNA, 1530 bp, Serratia proteamaculans 568
atggcagagaataattcggcaatccattcggtcgctgttattggtgccgggaccatgggcagaggtattgcctatcttctggcgcaaaacggcatacgaaccctgctttataatcgtagcggtaataatctgaatcaggccagggactatattattcgtgacctggataagaaaatagatggcggaaaaataagcccgcagaaaaaaggcgagatattggccaatctggttttctctcccattttcgaggctattgccgacagcgatctggtgattgaaaccatcgcggaacatgaggcaaccaagcatgagatcctcgcggcgattgcggccacggtgaaaaaagaggcgattatcgccaccaatacctcctcgctgtcattgaataagctggccgcaggcgtcgaaaataacgcccggtttatcggcctgcacttcttcaatccggccccgctgatgaaactgatcgaaattattccgtcttactttaccagccgggccaccagcctgcgttgccagcagttggtgacggcgataggcaaacagtttgtggtctgcaaagccacgccgggctttatcgtcaaccggatggcgcgacctttttatctggaagggttccggctgttggaagagaacgtggcgctggcgccgcagatcgaccgcgcactcaaggccggtggccactttcgcatgggacctttagagctgaccgattttatcggccaggatattaactatcaggtcagcagccagatttggcaggacatgcagtacgatccccgctatacccccggccatttgcaacgttcgctggtggatgccgggctgctggggaagaaaaacggccgatccttttttaccccctcttccgccgaacccagctccgccgatgcaggtagcggcacgccgacctcactgaatttttatggtgaacatcccctgttcgacctgttgcaacagcgcgctttggcgctctggccaagggtgcagattaatcgccaatcggaacagccaacgctgggccgctttatccgggtgaatgacgcaatggccatcaaaatcaccgatggccgcaccgccaatctgctggctgaattgaccgaactcgataccttcgtgatcgacgccgcgctcaactacgccgataccgcctatctggcggctgcccacagccaggatgccagcgcggccaataaagcgctgtttctgacgctgctgcaaacgttgatcccgcaggtggagtttattaaagactccccgggcctgattgtcgcccgcgtcctgagcagcctgatcaatgagtcggtgattatggtggagagcggggtttgcagccgggcggacatcgatatcgccgcggtggccggcgttaactatgccgatggcatctttagctggctggcgcagcttgggcaaaaaaacgtgaagtcgacgctggacaatatggcgcaactgctgcattccgcccgctattacccgcattactctttgctcaataccccccggccagagctggccgtcgcgccctaa

SEQ ID NO: 91 - DNA, 1530 bp, Serratia ureilytica Lr5/4
atggcagaaagtaatgcggcaattcaatcggctgcgattatcggcgcgggaacgatgggcagaggcatcgcttatcttttggcgcaaaaaagcattcgtacggtgctttataatcgcaacggcaataccctcaatcaagctcgcgacgctatcgtgcaagacctgaacaaaaaggtggaacagggcaagctcgcgctgcaggacaaagacgcggtgctggctaatctgacgttctccgcggaatttggggccatcgccgacagcgatctggtgatcgaaaccatcgcagagcatgagcaagccaaactcgaggtgctggcggccatcgccgcgacggtcaagcccgacacgctgatcgccaccaatacctcctcactgtcgcttaataagctggcgacggcggtgacgcacagcgaacgctttatcggtttgcactttttcaaccccgcgccgctgatgaagctgattgaaatcattccggcctattttaccgcacaggtcaccaccgaacgttgccgtcaactggtggcggcgttggggaaacgcgatgtcgtctgtcaggccacgccgggatttatcgtcaaccgtatggcccgcccctactatctggaagggttccgcctgttggaagaacacgtggcgcgtgcgccgcagatcgaccgcgccctcaaagccggcggacactttcgcatggggccgctcgaactgaccgattttatcggtcaggacatcaactatcaggtcagccggcaaatttggcaggacatgcagtacgatccgcgctataccccgggccatctgcagcgctcgctggtcgatgccggtctgttgggcaaaaagaacggccgctcctatttttccgccgaagaatctcctccgccgcttgcggccgccgtcgatgcggaggtcgagacgctacgcatttacggtgaacatcctctctttactctgctacagcagcgggccaccctgcaatggccgcggctgcgcgtggaacaacggccgacattaccgggcctgggcgccgccattcaggttaatgacgctttcaccgtcagcgttaccgatggccgcacggcaaaccagcttgccgaacagaccgcggcggacgcctttgtcgtcgatgtcgccctgaactacggcgatacggcgtacctggtggcggcgcatagccgccacgcctctgcagccaataaggcgctgtttttacgcctgctgcacaccgcgatcccgcaggtggaatttatcaaggattccccggccttgatcgtcgcccgcgtgctcagcagcctgatcaacgagtcggtgatcatggtggaaagcggcgtctgcagccgggaagacattgatgtcgccgccgtcgccggcgtgaactacgccgacggtattttcggctggctcactcgcctcggggaggaaaatgtcaggacgacgctgagcaacctggcgcaattgctgcacgcggcgcgctatgcgccgcattacacccttctgcacgccgcccaaccggcgctgaccaccacgccttaa

SEQ ID NO: 92 - DNA, 1530 bp, Serratia sp. BW106
atggcagagaataattcggcaatccattcggtcgctgttattggtgccggaaccatgggcagaggtattgcctatcttctggcgcagaacggcatacgaaccctgctttataatcgtagcggtaataatctggatcaggcccgcgactatattatccgtgacctggataagaaaatagacaacgggaaaataagccaacagaaaaaaggcgaagtattggccaacctggttttctctcccattttcgacgctatcgccgacagcgacctggtgattgaaaccatcgcggagcatgagaccaccaagcatgaaatcctcgcggcgattgcggccacggtgaaacaagaggccattatcgccaccaacacctcatcgctgtcgttgaataagctggcggcaggcgtcgaaaacaacgcccgttttatcggcctgcacttcttcaatccggccccgctgatgaaactgatcgagattattccgtcctattttaccagccgggccaccagcctgcgctgccagcagttggtgacggcgctaggcaaacagtttgtggtctgcaaagccacgccgggttttatcgtcaaccggatggcacggcctttttatctggaaggattccggctgttggaagaaaacgtagcattggcaccgcagatcgaccgcgccctcaaggccggtggccactttcgcatgggccctttagagctgaccgactttatcggccaggatattaactatcaggtcagcagccagatttggcaggacatgcagtacgaccctcgctatacccccggccatttgcaacgttcgctggtggatgccgggttgttggggaagaaaaacggccgatccttttttgctgccccttcttccgaatcgaaccccctcgacgcaggcaacggcacgctgacttccctgcatttttatggcgaacataccctgtttgacctgctgcaacagcgcgccttggctatctggccaacgctgcagattattcaccagccggaacggccgacgctgggacgctttatccgggtgaatgacgcattggccgtcaaaatcaccgatggtcgcaccgccaatctgctcgctgaattgaccgatctcgacacctttgtgatcgacgccgcactgaattacagcgataccgcctatctggtggccgcccacaatcaggacgccgccgaggccaataaagcgctgtttctgtcgctgctgcaaacgttgatcccgcaggtggagtttattaaagactctccaggcctgatcgtcgcccgggttctgagcagtctgatcaatgagtcggtgatcatggtggagagcggggtttgcagccgggcagatatcgatattgccgccgtggcgggcgttaactatgccgatggcatctttgcctggctgacgcagctcgggcaaaaaaacgtgaaatcaacgctggataatatggcgcaactgctgcattccgcccgctattacccgcattactcattgctgaatgccccccggcccgaactggccgtcgcgccgtaa

SEQ ID NO: 93 - DNA, 1530 bp, Serratia liquefaciens FK01
atggcagagaataatacggcaatagattcggtcgccgtgattggcgccggaaccatgggcagaggcattgcctatcttttggcactgaacggcatacgaaccctgctttataatcgaaacggtaatcatcttaaccaggcccgggattatattgtcggcgacctggataaaaaaatcgacaacggaaaaataagccaacagaaaaagggcgaggtcctggccaatctggttttctcgccagttttcgacgccattgccgacagtgacctggtgattgaaaccatagcggaacatgaacccaccaagcatgagatcctcgcggccattgccgccacggtaaaaaaagaggcgattatcgccaccaatacctcttcgctgtcgctgaataaactggccgcagggatagaaaacaactcgcgctttatcggcctgcatttcttcaacccggcaccgctgatgaagctgatcgaaattatcccgtcctattttaccgcccgggccaccaccttacgctgccagcagttggtcacggcgataggcaaaaaatttgtggtctgcaaagccacgccgggctttatcgtcaatcgcatggcgcggcctttttatctggaaggttttcgcctgctggaggaaaacgtggcgctggcaccgcaaatcgaccgcgcgctcaaggccggaggccacttccgcatggggcctttggaactgactgattttattggtcaggacattaattatcaggtcagcagccagatttggcaggacatgcagtatgacccccgctatacccccggccatttgcaacgttcgctggtggatgccgggctgttggggaagaaaaacgggcgctcttttttttccccctcggctgacgccgccaacccaccggctaccggcggcggtacgctgagctcgctgcatttttttggcgaacatccgctgtttgatctgctgcaacagcacgccttcgcaacctgggcgcccctggcaataacacgtcagccggaacacccggttctgggccgttttatccaggtgaatgacagtctggcagtcaaaatcaccgacgggcgaacggccaatcagcttgccgagctggcgggtctcgataccttcgtggtcgacgttgcactgaactatgccaacaccgcttttctggtggcggcccacagccaacaggctaccgaggcgaataaagagctgttcctcacgctgctgcaaacggtgatcccgcaggtggagtttgttaaagattccccaggcctgatcgtcgcccgggttctgagcagcctgatcaatgagtcggtgatcatggtggagagcggggtttgtagccgagaagacatcgatatcgccgccgtggccggcgtcaactatgccgacggcatttttgcctggctggcgcagctcgggcagaaaaacgtgaaatcgacgctggataatatggcgcaactgctgcattccgcccgctattacccgcactactcgttgctccacgctaccaggcccgagctggccgtcgcgccatga

SEQ ID NO: 94 - DNA, 1530 bp, Serratia sp. S119
atggcagaaagtaatgcggcaattcaatcggctgcgattatcggcgcgggaacgatgggcagaggcatcgcttatcttttcgcgcaaaaaggcattcgcacggtgctttataatcgcaacggcaataccctcaatcaggctcgcgaatatatcgcgcaagacctgaacaagaaagtcgaacagggcaagatcgcgctgcaggataaaggcgcagtgctggctaatctggtgttcacctcggtgtttgagactatcgccgacagcgatctagtgatagaaaccatcgccgagcaagagcaaaccaaacttgaggtgctggcggccatcgccgcggcggtcaagcccgacacgctgatcgccaccaatacatcctcactgtcgcttaacaagctggcaaccgcggtgacacacagcgagcggtttatcggtttgcactttttcaatcccgcgccgctgatgaaactgattgaaatcatcccggcctactttaccgcacgcgccaccaccgaacgttgccgtcagctggtggccgcgttggggaaacgcgatgtcgtctgccaggccacgccggggtttatcgtcaaccgcatggcccgcccctactacctggaagggttccgcctgttggaagaacacgtggcgcgcgcgccgcagatcgaccgcgccctcaaggccggcgggcactttcgcatggggccgctcgagctgaccgattttatcggccaggacatcaactatcaggtcagccggcaaatctggcaggacatgcaatacgatccgcgctatacccccggccatctgcagcgttcgctggtcgatgccggtctgttggggaaaaagaacggccgctcctattttgccgccgaagaaaacgccttaccggtaacggccgccaccgatgcagacgtcgagacgctgcgcgtttacggcgaacaccctttttttaccctgttgcaacagcgggccgcgcttcagtggccacggctgcgcgtggagcaacggccggccttaccgggcctggggccggccgtccagatcaatgaggctttcaccgtcagcgtcaccgatggccgcacggcgagccagttggcggagctgacggcggcggatgcctttgtggtcgatgtcgccctgaactacgccgacacggcgtatctggtggcagcgcacaaccgccacgcctctgcggccaataaggcgctgtttttacgcctgctgcacacggcaatcccgcaggttgaatttatcaaggactccccggcgctgatcgtcgcccgcgtcctcagcagcctgatcaacgagtcggtgatcatggtggaaagcggcgtctgcagccgggaagacatcaatgtcgccgccgtcgccggcgttaactacgccgacggcattttcggcttgctcgatagcctgggggagaaaaacgtcaggacgacgctgagcaacctggcgcagctgctgcacgcggcacgctatgcgccgcattacacccttctacacgccgcgcaaccggcgctgacgaccacgccttaa

SEQ ID NO: 95 - DNA, 1530 bp, Serratia sp. YD25
atggcagaacgtaatgcggcaattcaatcggctgcgattatcggcgcgggaacgatgggcagaggcatcgcttatcttttcgcgcaaaaaggcattcgtacggtgctttataatcgcaacggcaataccctcattcaggctcgtgaatatatcgtgcaagacctggacaaaaaggtcgaacagggcaggctcgcgccgcaggataaagacgcggtgctggccaatctgcagttctcatcggtgtttgaagctatcgtcgacagcgatttggtgctcgaaactatcgccgagcaagagcaagccaaactcgaggtgctggccgccatcgctgcggcggtcaaacccgacacgctgatcgccaccaatacttcctcattgtcgctcaataagctggcaacggcggtgacccacagcgaacgctttatcggtttgcactttttcaatcccgcaccgctaatgaagctgattgaaatcattccggcctactttaccacccaagccaccactgaacgttgccgccaactggtggcggcattggggaaacgcgatgtcgtctgccaggctacgccggggttcatcgtcaaccgtatggcccgcccctactacctggaaggctttcgcctgttggaagagcacgtggcgcgcgcgccgcagatcgaccgcgccctcaaggccggcggacactttcgcatggggccgctcgagctgaccgattttatcggccaggacatcaactatcaggtcagccggcaaatttggcaggacatgcagtacgacccgcgctatacccccggccatctgcagcgttcgctggtcgatgccgggctgctggggaaaaagaacggtcgctcctatttttccgccgaagaaaccgccccgccggttgaggccgccgccgaggcggatgtcgagacgctgcgcatttacggcgaacaccctttgtttaccctgctgcaacagcgagccgcactgcaatggccgcagttgcgcgtggaacagcggccggccttgtcgggcctgggagcggccattcaggtcaatgacgctttcaccgtcagcgtcaccgatggccgcacggcaaatcagttggccgagcagacggcggcggacgcctttgtggtcgatgtcgccctgaactacgccgacacggcgtatctggtggcggcgcacagccgccacgcctctgcggctaataaggcgttgtttttgcgcctgctgcacaccgcgcttccgcaggttgaatttatcaaggactccccggcgctgatcgtcgcccgcgtcctcagcagcctgatcaacgagtcggtgatcatggtggaaagcggcgtctgcagccgggaagacatcgatgtcgccgccgtcgccggcgtgaactacgccgacggcattttcggctggctcactcgcctgggggagaaaaacgtcaggacgacgctgagcaacctggcgcagctgctgcacgcggcccgctatgcgccgcattacacccttctgcacgccgcccaaccggcgctgaccaccacgccttaa

SEQ ID NO: 96 - DNA, 1530 bp, Serratia sp. FS14
atggcagaaagtaatgcggcaattcaatcggctgcgattatcggcgcgggaacgatgggcagaggcatcgcttatcttttcgcgcaaaaaggcattcccacgatgctttataatcgcaacggcaataccctcaatcaagctcgcgaatatatcgcgcaagacctgaacaagaaagtcgaacagggcaagatcgcgttgcaggataaagacgcggtgctggccaatctgatgttcacttccgtgtttgaggccatcgccgacagcgagctggtgatagaaaccatcgccgagcaagaacaaaccaaacttgaggtgctggcggccatcgccgcggtggtcaagcccgacacgctgatcgccaccaatacctcctcactgtcgcttaacaagctggcaactgcggtgacgcacagcgagcgctttatcggtttacattttttcaaccccgctccgctgatgaagctgattgaaatcattccggcctactttaccgcgcacgccaccacggaacgctgccgccaactggtggcggcgttggggaaacgcgatgtcgtctgccaggccacgccggggttcatcgtcaatcgcatggcccgcccctactacctggaagggttccgcctgttggaagaacatgtggcgcgcgcggcgcagatcgaccgcgccctcaaggccggcgggcgcttccgcatggggccgctcgagctgaccgattttatcggccaagacattaactatcaggtcagccggcaaatctggcaggacatgcaatacgacccgcgctatacccctggtcatctgcagcgttcactggtcgatgccggtctgttggggaaaaagaacggccgctcctattttgccgccgaagaaaccgccccgccggtgacggccgccaacaatgcagacgtcgagacgctgcgcgtttacggcgagcatcctttttttaccctgttgcagcagcgagccgcgcttcagtggccacagctgcgcgtggaacaacggccggcattaccggggctgggagcggccgtccagatcaatgacgctttcaccgtcagcatcaccgatggccgcacggcgagccaactggccgagcagacggcagcggatgcctttgtggtcgatgtcgccctgaactacgccgacaccacgtacctggtggcggcgcacagtcgccacgcttctgcggccaataaggcgctgtttttacgcctgctgcacacggcaatcccacaggttgaatttatcaaggactctccggcgcttatcgtcgcccgcgtcctcagcagcctgatcaatgagtcggtgatcatggtggaaagcggcgtctgcagccgggaagacatcgatgtcgccgccgtcgcgggcgttaactacgccggcggcattttcgactggctcggcaaactgggggagaaaaacgtcaggacgacgctgagcaatctggcacagctgctgcacgcggcgcgctatgcgccgcattacacccttctgcacgccgcgcaaccggcgctgacgaccacgccttaa

SEQ ID NO: 97 - DNA, 1530 bp, Serratia sp. HMSC15F11
atggcagaaagtaatgcggcaattcagtcggctgcgattatcggcgcgggaacgatgggcagaggcatcgcttatcttttcgcgcaaaaaggcattcgcacggtgctttataatcgcaacggcaataccctcaatcaggctcgcgactatatcgagctagacctgaacaagaaagtcgaacagggtaagatcgcgctgcaggataaaggcgcggtgttggccaatctggtgttcacctcggtatttgagaccattgccgacagcgagctggtgatagaaaccatcgccgagcaagagcaaaccaaacttgaggtgctggcggccatcgccgcggcagtcaagcccgacacgctgatcgccaccaatacctcctcactgtcgctgaataagctggcaaccgcggtgacgcacagcgagcggtttatcggtttgcacttttttaaccccgcgccgctgatgaaactgattgaaatcatcccggcctactttaccgcacacgccaccacggagcgttgccgtcaactggtggccgcgttggggaaacgcgatgttgtctgccaggccacgccggggtttatcgtcaaccgcatggcccgcccctactacctggaagggttccgcctattggaagaacacgtggcgcgcgcgccgcagatcgaccgtgccctcaaggccggcgggcactttcgtatggggccgctcgagctgaccgattttatcggccaggacatcaactatcaggtcagtcggcaaatctggcaggacatgcaatacgacgcgcgctatacccccggccacctgcagcgttcgctggtcgatgccggtctattgggaaaaaagaacggccgctcctattttgccgtcgaagaaaacgccccgccggtgatggccgccaccgatgcagacattgagacgctgcacgtttacggcgaacaccctttttttaccctgttacaacaacgtgccgcgcttcagtggccacagctgcgcgtggaacaacggccggcattaccgggcctggggccggccgtccggatcaatgacgctttcaccgtcagcatcaccgatggccgcacggcaaaccagctggccgagcagacggcggcggatgcctttgtggtcgatgtcgccctgaattacgccgacacggcgtatctggtggcagcgcacagccgccacgcctctgcagccaataaagcgctgttcttacgcctgctgcacacggcaatcccgcaggttgaatttatcaaggattccccggcgctgatcgtcgcccgcgtcctcagcagcctaatcaacgagtcggtgatcatggtggaaagcggcgtctgcagccgggaagacatcgatgtcgccgccgtcgccggcgttaactacgccgacggcattttcggctggctagatagcctgggggagaaaaacgtcaggacgacgctgagcaacctggcgcagctgctgcacgcagcacgctatgcgccgcattacacccttctgcacgccgcgcaaccggcgctgacgaccacgccttaa

SEQ ID NO: 98 - DNA, 1530 bp, Serratia sp. JKS000199
atggcagaaagtaatgcggcaattcaatcggctgcgattatcggcgcgggaacgatgggcagaggcatcgcttatcttttggcgcaaaaaagcattcgtacggtgctttataatcgcaacggcaataccctcaatcaagctcgcgacgctatcgtgcaagacctgaacaaaaaggtggaacagggcaagctcgcgctgcaggacaaagacgcggtgctggctaatctgacgttctccacggaatttggggccatcgccgacagcgatctggtgatcgaaaccatcgcagagcatgagcaagccaaactcgaagtgctggcggccatcgccgcgacggtcaagcccgacacgctgatcgccaccaatacctcctcactgtcgcttaataagctggcgacggcggtgacgcacagcgaacgctttatcggtttgcactttttcaaccccgcgccgctgatgaagctgattgaaatcattccggcctattttaccgcacaggtcaccaccgaacgttgccgtcaactggtggcggcgttagggaaacgcgatgtcgtctgtcaggccacgccgggatttatcgtcaaccgtatggcccgcccctactatctggaagggttccgcctgttggaagaacacgtggcgcgtgcgccgcagatcgaccgcgccctcaaagccggcggacactttcgcatggggccgctcgagctgaccgattttatcggtcaggacatcaactatcaggtcagccggcaaatttggcaggacatgcagtacgatccgcgctataccccgggccatctgcagcgctcgctggtcgatgccggtctgttgggcaaaaagaacggccgctcctatttttccgccgaagaatctcccccgccgcttgcggccgccgtcgatgcggaagtcgagacgctacgcatttacggtgaacatcctctctttaccctgctacagcagcgggccgccctgcaatggccgcggctgcgcgtggaacaacggccgacattaccgggcctgggcgccgccattcaggtcaatgacgctttcaccgtcagcgttaccgatggccgcacggcaaaccagcttgccgaacagaccgcggcggacgcctttgtcgtcgatgtcgccctgaactacggcgatacggcgtacctggtggcggcgcatagccgccacgcctctgcggccaataaggcgctgtttttgcgcctgctgcacaccgcgatcccgctggtggaatttatcaaggattccccggccttgatcgtcgcccgcgtgctcagcagcctgatcaacgagtcggtgatcatggtggaaagcggcgtctgcagccgggaagacattgatgtcgccgccgtcgccggcgtgaactacgccgacggtattttcggctggctcactcgcctcggggaggaaaatgtcaggacgacgctgagcaacctggcgcaattgctgcacgcggcgcgctatgcgccgcattacacccttctgcacgccgcccaaccggcgctgaccaccacgccttaa

SEQ ID NO: 99 - DNA, 1530 bp, Serratia sp. TEL
atggcagaaagtaatgcggcaattcaatcggctgcgattatcggcgcgggaacgatgggcagaggcatcgcttatcttttggcgcaaaaaagcattcgtacggtgctttataatcgcaacggcaataccctcaatcaagctcgcgacgctatcgtgcaagacctgaacaaaaaggtggaacagggcaagctcgcgctgcaggacaaagacgcggtgctggctaatctgacgttctccgcggaatttggggccatcgccgacagcgatctggtgatcgaaaccatcgcagagcatgagcaagccaaactcgaggtgctggcggccatcgccgcgacggtcaagcccgacacgctgatcgccaccaatacctcctcactgtcgcttaataagctggcgacggcggtgacgcacagcgaacgctttatcggtttgcactttttcaaccccgcgccgctgatgaagctgattgaaatcattccggcctattttaccgcacaggtcaccaccgaacgttgccgtcaactggtggcggcgttggggaaacgcgatgtcgtctgtcaggccacgccgggatttatcgtcaaccgtatggcccgcccctactatctggaagggttccgcctgttggaagaacacgtggcgcgtgcgccgcagatcgaccgcgccctcaaagccggcggacactttcgcatggggccgctcgaactgaccgattttatcggtcaggacatcaactatcaggtcagccggcaaatttggcaggacatgcagtacgatccgcgctataccccgggccatctgcagcgctcgctggtcgatgccggtctgttgggcaaaaagaacggccgctcctatttttccgccgaagaatctcctccgccgcttgcggccgccgtcgatgcggaggtcgagacgctacgcatttacggtgaacatcctctctttactctgctacagcagcgggccaccctgcaatggccgcggctgcgcgtggaacaacggccgacattaccgggcctgggcgccgccattcaggttaatgacgctttcaccgtcagcgttaccgatggccgcacggcaaaccagcttgccgaacagaccgcggcggacgcctttgtcgtcgatgtcgccctgaactacggcgatacggcgtacctggtggcggcgcatagccgccacgcctctgcagccaataaggcgctgtttttacgcctgctgcacaccgcgatcccgcaggtggaatttatcaaggattccccggccttgatcgtcgcccgcgtgctcagcagcctgatcaacgagtcggtgatcatggtggaaagcggcgtctgcagccgggaagacattgatgtcgccgccgtcgccggcgtgaactacgccgacggtattttcggctggctcactcgcctcggggaggaaaatgtcagggcgacgctgagcaacctggcgcaattgctgcacgcggcgcgctatgcgccgcattacacccttctgcacgccgcccaaccggcgctgaccaccacgccttaa

SEQ ID NO: 100 - DNA, 1530 bp, Serratia sp. ISTD04
atggcagaaagtaatgcggcaattcaatcggctgcgattatcggcgcgggaacgatgggcagaggcatcgcttatcttttggcgcaaaaaagcattcgtacggtgctttataatcgcaacggcaataccctcaatcaagctcgcgacgctatcgtgcaagacctgaacaaaaaggtggaacagggcaagctcgcgctgcaggacaaagacgcggtgctggctaatctgacgttctccgcagaatttggggtcatcgccgacagcgatctggtgatcgaaaccatcgcagaacatgagcaagccaaactcgaggtgctggcggccatcgccgcgacggtcaagtccgacacgctgatcgccaccaatacctcctcactgtcgcttaataagctggcgacggcggtgacgcacagcgaacgctttatcggtttgcactttttcaaccccgcgccgctgatgaagctgattgaaatcattccggcctattttaccgcacaggtcaccaccgaacgttgccgtcaactggtggcggcgttagggaaacgcgatgtcgtctgtcaggccacgccgggatttatcgtcaaccgtatggcccgcccctactatctggaagggttccgcctgttggaagaacacgtggcgcgtgcgccgcagatcgaccgcgccctcaaagccggcggacactttcgcatggggccgctcgagctgaccgattttatcggtcaggacatcaactatcaggtcagccggcaaatttggcaggacatgcagtacgatccgcgctataccccgggccatctgcagcgctcgctggtcgatgccggtctgttgggcaaaaagaacggccgctcctatttttccgccgaagaatctcccccgccgcttgcggccgccgtcgatgcggaagtcgagacgctacgcatttacggtgaacatcctctctttactctgctacagcagcgggccgccctgcaatggccgcggctgcgcgtggaacaacggccgacattaccgggcctgggcgccgccattcaggtcaatgacgctttcaccgtcagcgttaccgatggccgcacggcaaaccagcttgccgaacagaccgcggcggacgcctttgtcgtcgatgtcgccctgaactacggcgatacggcgtacctggtggcggcacatagccgccatgcctctgcggccaataaggcgctgtttttacgcctgctgcacaccgcgatcccgcaggtggaatttatcaaggattccccggccttgatcgtcgcccgcgtgctcagcagcctgatcaacgagtcggtgatcatggtggaaagcggcgtctgcagccgggaagacattgatgtcgccgccgtcgccggcgtgaactacgccgacggtattttcggctggctcactcgcctcggggaggaaaatgtcaggacgacgctgagcaacctggcgcaattgctgcacgcggcgcgctatgcgccgcattacacccttctgcacgccgcccaaccggcgctgaccaccacgccttaa

SEQ ID NO: 101 - DNA, 1530 bp, Serratia sp. SCBI
atggcagaaagtaatgcggcaattcaatcggctgcgattatcggcgcgggaacgatgggcagaggcatcgcttatcttttggcgcaaaaaagcattcgtacggtgctttataatcgcaacggcaataccctcaatcaagctcgcgacgctatcgtgcaagacctgaacaaaaaggtggaacagggcaagctcgcgctgcaggacaaagacgcggtgctggctaatctgacgttctccgcggaatttggggccatcgccgacagcgatctggtgatcgaaaccatcgcagagcatgagcaagccaaactcgaggtgctggcggccatcgccgcgacggtcaagcccgacacgctgatcgccaccaatacctcctcactgtcgcttaataagctggcgacggcggtgacgcacagcgaacgctttatcggtttgcactttttcaaccccgcgccgctgatgaagctgattgaaatcattccggcctattttaccgcacaggttaccaccgaacgttgccgtcaactggtggcggcgttggggaaacgcgatgtcgtctgtcaggccacgccgggatttatcgtcaaccgtatggcccgcccctactatctggaagggttccgcctgttggaagaacacgtggcgcgtgcgccgcagatcgaccgcgccctcaaagccggcggacactttcgcatggggccgctcgagctgaccgattttatcggtcaggacatcaactatcaggtcagccggcaaatttggcaggacatgcagtacgatccgcgctataccccgggccatctgcagcgctcgctggtcgatgccggtctgttgggcaaaaagaacggccgctcctatttttccaccgaagaatctcccccgccgcttgcggccgccgtcgatgcggaggtcgagacgctacgcatttacggtgaacatcctctctttaccctgctacagcagcgggccgccctgcaatggccgcggctgcgcgtggaacaacggccgacattaccgggcctgggcgccgccattcaggtcaatgacgctttcaccgtcagcgttaccgatggccgcacggcaaaccagcttgccgaacagaccgcggcggacgcctttgtcgtcgatgtcgccctgaactacggcgatacggcgtacctggtggcggcgcatagccgccacgcctctgcggccaataaggcgctgtttttacgcctgctgcacaccgcgatcccgcaggtggaatttatcaaggattccccggccttgatcgtcgcccgcgtgctcagcagcctgatcaacgagtcggtgatcatggtggaaagcggcgtctgcagccgggaagacattgatgtcgccgccgtcgccggcgtgaactacgccgacggcattttcggctggctcactcgcctcggggaggaaaatgtcaggacgacgctgagcaacctggcgcaattgctgcacgcggcgcgctatgcgccgcattacacccttctgcacgccgcccaaccggcgctgaccaccacgccttaa

SEQ ID NO: 102 - DNA, 1530 bp, Serratia sp. S4
atggcagagaataattcggcaatccattcggtcgctgttattggtgccgggaccatgggcagaggtattgcctatcttctggcgcaaaacggcatacgaaccctgctttataatcgtagcggtaataatctgaatcaggccagggactatattatccgtgacctggataagaaaatagatggcggtaaaataagcctgcagaagaaaggcgagatattggccaatctggttttctctcctattttcgaggctattgccgacagcgacctggtgattgaaaccatcgcggaacatgagtcaaccaagcatgagatcctctcggcgattgcggccacggtgaaaaaagaggcgattatcgccaccaatacctcatcgctgtcattgaataagctggcggcaggcgtcgaaaataacgcccgttttatcggcctgcacttcttcaatccggccccgctgatgaaactgatcgaaattattccgtcttactttaccagccgggccaccagcctgcgttgccagcagttggtgacggtgataggcaaacagtttgtggtctgcaaagccacgccgggctttatcgtcaaccggatggcgcgacctttttatctggaagggtttcggctgttggaagagaacgtggcgctggcgccgcagatcgaccgcgcactcaaggccggtggccacttccgcatgggacctttagagctgaccgattttatcggccaggatattaactatcaggtcagcagccagatttggcaggacatgcagtacgacccccgctatacccccggtcatttgcaacgttcgctggtggatgccgggctgctggggaagaaaaacggccgatccttttttaccccctcttccgccacacccagctccgccgacgcaggcagcggcacgccgacctcactgaatttttatggtgaacatcccctgttcgacctgttgcaacagcgcgctttggcgctctggccaaggttgcagattaatcgccaatcggaacagccaacgctgggccgctttatccgggtgaatgacgcaatggccatcaaaattaccgatggccgcaccgccaatctgctggctgaattgaccgaactcgataccttcgtgatcgacgccgcgctcaactacgccgataccgcctatctggcggctgcccacagccaggatgccagcacggccaataaagcgctgtttctgacgctgctgcaaacgttgatcccacaggtggagtttattaaagactccccgggcctgattgtcgcccgcgtcctgagcagcctgatcaatgagtcggtgattatggtggagagcggggtttgcagccgggcggacatcgatatcgccgcggtggccggcgttaactatgccgatggcatctttagctggctggcgcagcttgggcaaaaaaacgtgaagtcgacgctggacaatatggctcaactgctgcattccgcccgctattacccgcattactctttgctcaataccccccggccagagctggccgtcgcgccctaa

SEQ ID NO: 103 - DNA, 1530 bp, Serratia sp. C-1
atggcagagaataattcggcaatccgttcagccgccgttattggtgcggggaccatgggcagaggcatcgcctacctcctggcactgaacggcatacgaaccgtactttataatcgcaatggtaataatctcaatcaggcccgtgactatattgtcagcgacctggacagaaaaatagataacggaaaaataaccctgcagaaaaaaggccagatattagccaatattattttctcggccgtctttgacgccataaccgacagcgatctggtgattgaaaccattgcggaagatgagcaaaccaagcatgaaatcctggcagccattgcggctacggtaaaaccggaggcgatcattgcgaccaatacctcctcgttgtcgctgaacaaactggcagcaggggtggaaaacaacccgcgctttatcggcctgcattttttcaatccggcgccgctgatgaagttgatcgaaatcattccctcttattttacctcccacgccaccagcctacgctgccagaagttggtaatagcattgggtaaacagtttgtggtctgcaaagccacgccgggctttattgttaatcgcatggcgcggcctttctatctggaagggttccggctgctggaggaaaacgtggcgctggcgccacagatcgaccgcgccctcaaggccggcgggcattttcgcatgggccctttagaactgacggattttatcggtcaggatatcaactaccaggtcagcaagcagatttggcaggatatgcagttcgaccctcgctatacccctggtcatttgcaacgctcgctggtggatgccgggctgctggggaggaaaaacgggcgctctttttttgcttcccaaccggcgacgccgcccaccccgaccacagagagcgacacgccaacgtcactgcatttttatggggagcatgctttattcgatcatctgcaacagcgtgctctggccgcctggcctgcgctgcgcgttcagcggttgccggaacggcctgaactggggcgatttatcctggtgaataacgcgctggcgatcaaaatcaccgatggcagaacggcaaacctgctcgccggcttaaccgctctcgacaccttcgtgattgacgctgcgctgaattacgccgacaccgcctatctggtggcagcccacaatcaacatgccacagagacgaataaagcgctgtttctgacgctgctgcaaaccgtcatcgctcaggtggagtttattaaagattcccctgccctgatcgttgcccgcgtactgagcagcctgatcaatgaatcggtgatcatggtggagagcggcgtttgcagccgggcagatatcgatatcgccgccgtggccggcgtgaactatgccgacggcatttttgcctggttggcgcagctcgggcagaaaaacgtgaaatcgacgctggataacatggcgcaactgctgcactccgcgcgctattacccgcattactctttgctgaacgcggcccggcctgagctggccgtagcgccctaa

SEQ ID NO: 104 - DNA, 1530 bp, Serratia marcescens 532
atggcagaaagtaatgcggcaattcaatcggctgcgattatcggcgcgggaacgatgggcagaggcatcgcttatcttttcgcgcaaaaaggcattcgcacggtgctttataatcgcaacggcaataccctcaatcaggctcgcgaatatatcgcgcaagacctgaacaagaaagtcgaacagggcaagatcgcgctgcaggataaaggcgcggtgctggccaatctgatgttcacttcagtgtttgaggccatcaccgacagcgagctggtgatagaaaccatcgccgagcaagaacaaaccaaacttgaggtgctggcggccatcgccgcggtggtcaagcccgacacgctgatcgccaccaatacctcctcactgtcgcttaacaagctggctactgcggtgacgcacagcgaacgctttatcggtttgcattttttcaaccccgcgccgctgatgaagctgattgaaatcattccggcctactttaccgcgcacgccaccaccgaacgctgccgccaactggtggcggcgttggggaaacacgatgtcgtctgccaggccacgccggggttcatcgtcaatcgcatggcccgcccctactacctggaagggttccgtctgttggaagaacacgtggcgcgcgcggcgcagatcgaccgcgctctcaaggccggcgggcgcttccgcatggggccgctcgagctgaccgattttatcggccaagacatcaactatcaggtcagtcggcaaatctggcaggacatgcaatacgacccgcgctatacccccggtcatctgcagcgttcactggtcgatgccggtctgttggggaaaaagaacggccgctcctattttgccgccgaagaaaccgccccgccggtgacggccgccagcaatgcagacgtcgagacgctgcgcgtttacggcgagcaccctttttttaccctgttacagcagcgagccgcgcttcagtggccacagctgcgcgtggaacaacggccggcattaccggggctggggtcggccgtccagatcaatgacgctttcaccgtcagcatcaccgatggccgcacggcgagccaactggccgagcagacggcagcagatgcctttgtggtcgatgtcgccctgaactacgccgacacgacgtatctggcggcggcgcacagccgccacgcctctgcggccaataaggcgctgtttttacgcctgctgcacacggcaatcccgcaggttgaatttatcaaggactctccggcgcttatcgtcgcccgcgtcctcagcagcctgatcaatgagtcggtgatcatggtggaaagcggcgtctgcagccgggaagacatcgatgtcgccgccgtcgcgggcgttaactacgccggcggcattttcgactggctcggcaaactgggggagaaaaacgtcaggacaacactgagcaatctggctcagctgctgcacgcggcgcgctatgcgccgcattacacccttctgcacgccgcgcaaccggcgctgacgaccacgccttaa

SEQ ID NO: 105 - DNA, 1530 bp, Serratia marcescens 2880STDY5683033
atggcagaaagtaatgcggcaattcaatcggctgcgattatcggcgcgggaacgatgggcagaggcatcgcttatcttttcgcgcaaaaaggcattcgcacggtgctttataatcgcaacggcaataccctcaatcaggctcgcgaatatatcgcgcacgacctgaacaagaaagtcgaacaaggcaagatcgcgctgcaggataaaggcgcggtgctggccaatctaatgttcacttcagtgtttgaggccatcgccgacagcgagctggtgatagaaaccatcgccgagcaagaacaaaccaaacttgaggtgctggcggccatcgccgcggtggtcaagcccgacacgctgatcgccaccaatacctcctcactgtcgcttaacaagctggctactgcggtgacgcacagcgaacgctttatcggtttgcattttttcaaccccgcgccgctgatgaagctgattgaaatcattccggcctactttaccgcgcacgccaccaccgaacgctgccgccaactggtagcggcgttggggaaacacgatgtcgtctgccaggccacgccggggttcatcgtcaatcgcatggcccgcccctactacctggaagggttccgcctgttggaagaacacgtggcgcgcgcggcgcagatcgaccgcgccctcaaggccggcgggcgcttccgcatggggccgctcgagctgaccgattttatcggccaagacatcaactatcaggtcagtcggcaaatctggcaggatatgcaatacgacccgcgctatacccccggtcatctgcagcgttcactggtcgatgccggtctgttggggaaaaagaacggccgctcctattttgccaccgaagaaaccgccccgccggtgacggccgccagcaatgcagacgtcgagacgctgcgcgtttacggcgagcaccctttttttaccctgttacagcagcgagccgcgcttcagtggccacagctgcgcgtggaacaacggccggcattaccggggctggggtcggccgtccagatcaatgacgctttcaccgtcagcatcaccgatggccgcacggcgagccaactggccgagcagacggcagcggatgcctttgtggtcgatgtcgccctgaactacgccgacacgacgtatctggcggcggcgcacagccgccacgcctctgcggccaataaggcgctgtttttacgcctgctgcacacggcaatcccgcaggttgaatttatcaaggactctccggcgcttatcgtcgcccgcgtcctcagcagcctgatcaatgagtcggtgatcatggtggaaagcggcgtctgcagccgggaagacatcgatgtcgccgccgtcgcgggcgttaactacgccggcggcattttcgactggctcggcaaactgggggagaaaaacgtcaggacaacgctgagcaatctggctcagctgctgcacgcggcgcgctatgcgccgcattacacccttctgcacgccgcgcaaccggcgctgacgaccacgccttaa

SEQ ID NO: 106 - DNA, 1530 bp, Serratia marcescens WW4
atggcagaaagtaatgcggcaattcaatcggctgcgattatcggcgcgggaacgatgggcagaggcatcgcttatcttttcgcgcaaaaaggcattcccacgatgctttataatcgcaacggcaataccctcaatcaagctcgcgaatatatcgcgcaagacctgaacaagaaagtcgaacagggcaagatcgcgctgcaggataaagacgcggtgctggccaatctgatgttcacttccgtgtttgaggccatcgccgacagcgagctggtgatagaaaccatcgccgagcaagaacaaaccaaacttgaggtgctggcggccatcgccgcagtggtcaagcccgacacgctgatcgccaccaatacctcctcactgtcgcttaacaagctggcaactgcggtgacgcacagcgagcgctttatcggtttgcattttttcaaccccgcgccgctgatgaagctgattgaaatcattccggcctactttaccgcacacgccaccacggaacgctgccgccaactggtggcggcgttggggaaacgcgatgtcgtctgccaggccacgccggggttcatcgtcaatcgcatggcccgcccctactacctggaagggttccgcctgttggaagaacatgtggcgcgcgcggcgcagatcgaccgcgccctcaaggccggcgggcgcttccgcatggggccgctcgagctgaccgattttatcggccaagacattaactatcaggtcagccggcaaatctggcaggacatgcaatacgacccgcgctatacccctggtcatctgcagcgttcactggtcgatgccggtctgttggggaaaaagaacggccgctcctattttgccgccgaagaaaccgccccgccggtgacggccgccaacaatgcagacgtcgagacgctgcgcgtttacggcgagcatcctttttttaccctgttgcagcagcgagccgcgcttcagtggccacagctgcgcgtggaacaacggccggcattaccggggctgggagcggccgtccagatcaatgacgctttcaccgtcagcatcaccgatggccgcacggcgagccaactggccgagcagacggcagcggatgcctttgtgatcgatgtcgccctgaactacgccgacaccacgtatctggtggcggcgcacagccgccacgcttctgcggccaataaggcgctgtttttacgcctgctgcacacggcaatcccgcaggttgaatttatcaaggactccccggcgcttatcgtcgcccgcgtcctcagcagcctgatcaatgagtcggtgatcatggtggaaagcggcgtctgcagccgggaagacatcgatgtcgccgccgtcgcgggcgttaactacgccggcggcattttcgactggctcggcaaactgggggagaaaaacgtcaggacgacgctgagcaatctggcgcagctgctgcacgcggcgcgctatgcgccgcattacacccttctgcacgccgcgcaaccggcgctgacgaccacgccttaa

SEQ ID NO: 107 - DNA, 1530 bp, Serratia marcescens K27
atggcagaaagtaatgcggcaattcaatcggctgcgattatcggcgcgggaacgatgggcagaggcatcgcttatcttttcgcgcaaaaaggcattcccacgatgctttataatcgcaacggcaataccctcaatcaagctcgcgaatatatcgcgcaagacctgaataagaaagtcgaacagggcaagatcgcgctgcaggataaagacgcggtgctggccaatctgatgttcacttccgtgtttgaggccatcgccgacagcgagctggtaatagaaaccatcgccgagcaagaacaaaccaaacttgaggtgctggcggccatcgccgcggtggtcaagcccgacacgctgatcgccaccaatacctcctcactgtcgctcaacaagctggcaactgcggtgacgcacagcgaacgctttatcggtttacattttttcaaccccgcgccgctgatgaagctgattgaaatcattccggcctactttaccgcgcacgccaccacggaacgctgccgccaactggtggcggcgttagggaaacgcgatgtcgtctgccaggccacgccggggttcatcgtcaatcgcatggcccgcccctactacctggaagggttccgcctgttggaagaacatgtggcgcgctcggcgcagatcgaccgcgccctcaaggccggcgggcgcttccgcatggggccgctcgagctgaccgattttatcggccaagacattaactatcaggtcagccggcaaatctggcaggacatgcaatacgacccgcgctatacccctggtcatctgcagcgttcactggtcgatgccggtctgttggggaaaaagaacggccgctcctattttgccgccgaagaaaccgccccgccggtgacggccgccaacaatgcagacgtcgagacgctgcgcgtttacggcgagcatcctttttttaccctgttgcagcagcgagccgcgcttcagtggccacagctgcgcgtggaacaacggccggcattaccggggctgggagcggccgtccagatcaatgacgctttcaccgtcagcatcaccgatggccgcacggcgagccaactggccgagcagacggcagcggatgcctttgtggtcgatgtcgccctgaactacgccgacaccacgtatctggtggcggcgcacagccgccacgcttctgcggccaataaggcgctgtttttacgcctgctgcacacggcaatcccgcaggttgaatttatcaaggactctccggcgcttatcgtcgcccgcgtcctcagcagcctgatcaatgagtcggtgatcatggtggaaagcggcgtctgcagccgggaagacatcgatgtcgccgccgtcgcgggcgttaactacgccggcggcattttcgactggctcggcaaactgggggagagaaacgtcaggacgacgctgagcaatctggcgcagctgctgcacgcggcgcgctatgcgccgcattacacccttctgcacgccgcgcaaccggcgctgacgaccacgccttaa

SEQ ID NO: 108 - DNA, 1530 bp, Serratia marcescens 280
atggcagaaagtaatgcggcaattcaatcggctgcgattatcggcgcgggaacgatgggcagaggcatcgcttatcttttcgcgcaaaaaggcattcccacgatgctttataatcgcaacggcaataccctcaatcaagctcgcgaatatatcgcgcaagacctgaataagaaagtcgaacagggcaagatcgcgctgcaggataaagacgcggtgctggccaatctgatgttcacttccgtgtttgaggccatcgccgacagcgagctggtaatagaaaccatcgccgagcaagaacaaaccaaacttgaggtgctggcggccatcgccgcagtggtcaagcccgacacgctgatcgccaccaatacctcctcactgtcgcttaacaagctggcaactgcggtaacgcacagcgaacgctttatcggtttgcattttttcaaccccgcgccgctgatgaagctgattgaaatcattccggcctactttaccgcgcacgccaccacggaacgctgccgccaactggtggcggcgttggggaaacgcgatgtcgtctgccaggccacgccggggttcatcgtcaatcgcatggcccgcccctactacctggaagggttccgcctgttggaagaacatgtggcgcgcgcggcgcagatcgaccgcgccctcaaggctggcgggcgcttccgcatggggccgctcgagctgaccgattttatcggccaagacatcaactatcaggtcagccggcaaatctggcaggacatgcaatacgacccgcgctatacccctggtcatctgcagcgttcactggtcgatgccggtctgttggggaaaaagaacggccgctcctattttgccgccgaagaaaccgccccgccggtgacggccgccaacaatgcagacgtcgagacgctgcgcgtttacggcgagcaccctttttttaccctgttgcagcagcgagccgcgcttcagtggccacagctgcgcgtggaacaacggccggcattaccggggctgggagcggccgtccagatcaatgacgctttcaccgtcagcatcaccgatggccgcacggcgagccaactggccgagcagacggcagcggatgcctttgtggtcgatgtcgccctgaactacgccgacaccacgtatctggtggcggcgcacagccgccacgcttctgctgccaataaggcgctgtttttactcctgctgcacacggcaatcccgcaggttgaatttatcaaggactccccggcgcttatcgtcgcccgcgtcctcagcagcctgatcaatgagtcggtgatcatggtggaaagcggcgtctgcagccgggaagacatcgatgtcgccgccgtcgcgggcgttaactacgccggcggcattttcgactggctcggcaagctgggggagaaaaacgtcaggacgacgctgagcaatctggcgcagctgctgcacgcggcgcgctatgcgccgcattacacccttctgcacgccgcgcaaccggcgctgacgaccacgccttaa

SEQ ID NO: 109 - DNA, 1530 bp, Serratia marcescens 19F
atggcagaaagtaatgcggcaattcaatcggctgcgattatcggcgcgggaacgatgggcagaggcatcgcttatcttttcgcgcaaaaaggcattcccacgatgctttataatcgcaacggcaataccctcaatcaagctcgcgaatatatcgcgcaagacctgaacaagaaagtcgaacagggcaagatcgcgctgcaggataaggacgcggtgctggccaatctgatgttcacttccgtgtttgaggccatcgccgacagcgagctggtaatagaaaccatcgccgagcaagaacaaaccaaacttgaggtgctggcggccatcgccgcggtggtcaagcacgacacgctgatcgccaccaatacctcctcactgtcgcttaacaagctggcaactgcggtgacgcacagcgaacgctttatcggtttgcattttttcaaccccgcgccgctgatgaagctgattgaaatcattccggcctactttaccgcgcacgccaccacggaacgctgccgccaactggtggcggcgttggggaaacgcgatgtcgtctgccaggccacgccggggttcatcgtcaatcgcatggcccgcccctactacctggaagggttccgcctgttggaagaacatgtggcgcgcgcggcgcagatcgaccgcgccctcaaggccggcgggcgcttccgcatggggccgctcgagctgaccgattttatcggccaagacattaactatcaggtcagccggcaaatctggcaggacatgcaatacgacccgcgctatacccctggtcatctgcagcgttcactggtcgatgccggtctgttggggaaaaagaacggccgctcctattttgccgccgaagaaaccgccccgccggtgacggccgccaacaatgcagacgtcgagacgctgcgcgtttacggcgagcatcctttttttaccctgttgcagcagcgagccgcgcttcagtggccacagctgcgcgtggaacaacggccggcattaccggggctgggagcggccgtccagatcaatgacgctttcaccgtcagcatcaccgatggccgcacggcgagccaactggccgagcagacggcagcggatgcctttgtggtcgatgtcgccctgaactacgccgacaccacgtatctggtggcggcgcacagccgccacgcttctgcggccaataaggcgctgtttttacgcctgctgcacacggcaatcccgcaggttgaatttatcaaggactccccggcgcttatcgtcgcccgcgtcctcagcagcctgatcaatgagtcggtgatcatggtggaaagcggcgtctgcagccgggaagacatcgatgtcgccgccgtcgcgggcgttaactacgccggcggcattttcgactggctcggcaaactgggggagaaaaacgtcaggacgacgctgagcaatctggcgcagctgctgcacgcggcgcgctatgcgccgcattacacccttctgcacgccgcgcaaccggcgctgacgaccacgccttaa

SEQ ID NO: 110 - DNA, 1530 bp, Serratia marcescens 1185
atggcagaaagtaatgcggcaattcaatcggctgcgattatcggcgcgggaacgatgggcagaggcatcgcttatcttttcgcgcaaaaaggcattcccacgatgctttataatcgcaacggcaataccctcaatcaagctcgcgaatatatcgcgcaagacctgaacaagaaagtcgaacagggcaagatcgcgctgcgggataaagacgcggtgctggccaatctgatgttcacttccgtgtttgaggccatcgccgacagcgagctggtgatagaaaccatcgccgagcaagaacaaaccaaacttgaggtgctggcggccatcgccgcggtggtcaagcccgacacgctgatcgccaccaatacctcctcactgtcgcttaacaagctggctactgcggtgacgcacagcgaacgctttatcggtttgcattttttcaaccccgcgccgctgatgaagctgattgaaatcattccggcctactttaccgcgcacgccaccaccgaacgctgccgccaactggtggcggcgttggggaaacacgatgtcgtctgccaggccacgccggggttcatcgtcaatcgcatggcccgcccctactacctggaagggttccgcctgttggaagaacatgtggcgcgcgcggcgcagatcgaccgcgccctcaaggccggcgggcgcttccgcatggggccgctcgagctgaccgattttatcggccaagacatcaactatcaggtcagccggcaaatctggcaggacatgcaatacgacccgcgctatacccctggtcatctgcagcgttcactggtcgatgccggtctgttggggaaaaagaacggccgctcttattttgccgccgaagaaaccgccccgccggtgacggccgccaacaatgcagacgtcgagacgctgcgcgtttacggcgagcatcctttttttaccctgttgcagcagcgagccgcgcttcagtggccacagctgcgcgtggaacaacggccggcattaccggggctgggagcggccgtccagatcaatgacgctttcaccgtcagcatcaccgatggccgcacggcgagccaactggccgagcagacggcagcggatgcctttgtggtcgatctcgccctgaactacgccgacaccacgtatctggtggcggcgcacagccgccacgcttctgcggccaataaggcgctgtttttacgcctgctgcacacggcaatcccgcaggttgaatttatcaaggactctccggcgcttatcgtggcccgcgtcctcagcagcctgatcaatgagtcggtgatcatggtggaaagcggcgtctgcagccgggaagacatcgatgtcgccgccgtcgcgggcgttaactacgccggcggcattttcgactggctcggcaaactgggggagaaaaacgtcaggacgacgctgagcaatctggcgcagctgctgcacgcggcgcgctatgcgccgcattacacccttctgcacgccgcgcaatcggcgctgacgaccacgccttaa

SEQ ID NO: 111 - DNA, 1530 bp, Serratia marcescens S2I7
atggcagaaagtaatgcggcaattcaatcggctgcgattatcggcgcgggaacgatgggcagaggcatcgcttatcttttcgcgcaaaaaggcattcccacgatgctttataatcgcaacggcaataccctcaatcaagctcgcgaatatatcgcgcaagatctgaataagaaagtcgaacagggcaagatcgcgctgcaggataaggacgcggtgctggccaatctgatgttcacttccgtgtttgaggccatcgccgacagcgagctggtgatagaaaccatcgccgagcaagaacaaaccaaacttgaggtgctggcggccatcgccgcggtggtcaagcccgacacgctgatcgccaccaatacctcctcactgtcgcttaacaagctggcaactgcggtgacgcacagcgaacgctttatcggtttgcattttttcaaccccgcgccgctgatgaagctgattgaaatcattccggcctactttaccgcgcacgccaccacggaacgctgccgccaactggtggcggcgttggggaaacgcgatgtcgtctgccaggccacgccggggttcatcgtcaatcgcatggcccgcccctactacctggaagggttccgcctgttggaagaacatgtggcgcgcgcggcgcagatcgaccgcgccctcaaggccggcgggcgcttccgcatggggccgctcgagctgaccgattttatcggccaagacatcaactatcaggtcagccggcaaatctggcaggacatgcaatacgacccgcgctatacccctggtcatctgcagcgttcactggtcgatgccggtctgttggggaaaaagaacggccgctcctattttgccgccgaagaaaccgccccgccggtgacggccgccaacaatgcagacgtcgagacgctgcgcgtttacggcgagcatcctttttttaccctgttgcagcagcgagccgcgcttcagtggccacagctgtgcgtggaacaacggccggcattaccggggctgggagcggccgtccagatcaatgacgctttcaccgtcagcatcaccgatggccgcacggcgagccaactggccgagcagacagcagcggatgcctttgtggtcgatgtcgccctgaactacgccgacaccacgtatctggtggcagcgcacagccgccacgcttctgcggccaataaggcgctgtttttacgcctgctgcacacggcaatcccgcaggttgaatttatcaaggactctccggcgcttatcgtcgcccgcgtcctcagcagcctgatcaatgagtcggtgatcatggtggaaagcggcgtctgcagccgggaagacatcgatgtcgccgccgtcgcgggcgttaactacgccggcggcattttcgactggctcggcaaactgggggagagaaacgtcaggacgacgctgagcaatctggcgcagctgctgcacgcggcgcgctatgcgccgcattacacccttctgcacgccgcgcaaccggcgctgacgaccacgccttaa

SEQ ID NO: 112 - DNA, 1530 bp, Serratia marcescens KHCo-24B
atggcagaaagtaatgcggcaattcaatcggctgcgattatcggcgcgggaacgatgggcagaggcatcgcttatcttttcgcgcaaaaaggcattcccacgatgctttataatcgcaacggcaataccctcaatcaagctcgcgaatatatcgcgcaagacctgaataagaaagtcgaacagggcaagatcgcgctgcgggataaagacgcggtgctggccaatctgatgttcacttccgtgtttgaggccatcgccgacagcgagctggtgatagaaaccatcgccgagcaagaacaaaccaaacttgaggtgctggcggccatcgccgcagtggtcaagcccgacacgctgatcgccaccaatacctcctcactgtcgctcaacaagctggcaacggcggtaacgcacagcgaacgctttatcggtttgcattttttcaaccccgcgccgctgatgaagctgattgaaatcattccggcctactttaccgcgcacgccaccacggaacgctgccgccaactggtggcggcgttggggaaacgcgatgtcgtctgccaggccacgccggggttcatcgtcaatcgcatggcccgcccctactacctggaagggttccgcctgttggaagaacatgtggcgcgcgcggcgcagatcgaccgcgccctcaaggctggcgggcgcttccgcatggggccgctcgagctgaccgattttatcggccaagacatcaactatcaggtcagccggcaaatctggcaggacatgcaatacgacccgcgctatacccctggtcatctgcagcgttcactggtcgatgccggtctgttggggaaaaagaacggccgctcctattttgccgccgaagaaaccgccccgccggtgacggccgccaacaatgcagacgtcgagacgctgcgcgtttacggcgagcatcctttttttaccctgttgcagcagcgagccgcgcttcagtggccacagctgcgcgtggaacaacggccggcattaccggggctgggagcggccgtccagatcaatgacgctttcaccgtcagcatcaccgatggccgcacggcgagccaactggccgagcaggcggcagcggatgcctttgtggtcgatctcgccctgaactacgccgacaccacgtatctggtggcggcgcacagccgccacgcttctgcggccaataaggcgctgtttttacgcctgctgcacacggcaatcccgcaggttgaatttatcaaggactctccggcgcttatcgtcgcccgcgtcctcagcagcctgatcaatgagtcggtgatcatggtggaaagcggcgtctgcagccgggaagacatcgatgtcgccgccgtcgcgggcgttaactacgccggcggcattttcgactggctcggcaaactgggggagaaaaacgtcaggacgacgctgagcaatctggcgcagctgctgcacgcggcgcgctatgcgccgcattacacccttctgcacgccgcgcaaccggcgctgacgaccacgccttaa

SEQ ID NO: 113 - DNA, 1530 bp, Serratia marcescens Z6
atggcagaaagtaatgcggcaattcaatcggctgcgattattggcgcgggaacgatgggcagaggcatcgcttatcttttcgcgcaaaaaggcattcccacgatgctttataatcgcaacggcaataccctcaatcaagctcgcgaatatatcgcgcaagacctgaacaagaaagtcgaacagggcaagatcgcgctgcaggataaagacgcggtgctggccaatctgatgttcacttccgtgtttgaggccatcgccgacagcgagctggtgatagaaaccatcgccgagcaagaacaaaccaaacttgaggtgctggcggccatcgccgcggtggtcaagcccgacacgctgatcgccaccaatacctcctcactgtcgcttaacaagctggcaactgcggtgacgcacagagagcgctttatcggtttgcattttttcaaccccgcgccgctgatgaagctgattgaaatcattccggcctactttaccgcgcacgccaccacggaacgctgccgccaactggtggcggcgttggggaaacgcgatgtcgtctgccaggccacgccggggttcatcgtcaatcgcatggcccgcccctactacctggaagggttccgcctgttggaagaacatgtggcgcgcgcggcgcagatcgaccgcgccctcaaggccggcgggcgcttccgcatggggccgctcgagctgaccgattttatcggccaagacattaactatcaggtcagccggcaaatctggcaggacatgcaatacgacccgcgctatacccctggtcatttgcagcgttcactggtcgatgccggtctgttggggaaaaagaacggccgctcctattttgccgccgaagaaaccgccccgccggtgacggccgccaacaatgcagacgtcgagacgctgcgcgtttacggcgagcaccctttttttaccctgttgcagcagcgagccgcgcttcagtggccacagctgtgcgtggaacaacggccggcattaccggggctgggagcggccgtccagataaatgacgctttcaccgtcagcatcaccgatggccgcacggcgagccaactggccgagcagacggcagcggatgcctttgtgatcgatgtcgccctgaactacgccgacaccacgtatctggtggcagcgcacagccgccacgcttctgcggccaataaggcgctgtttttacgcctgctgcacacggcaatcccgcaggttgaatttatcaaggactccccggcgcttatcgtcgcccgcgtcctcagcagcctgatcaatgagtcggtgatcatggtggaaagcggcgtctgcagccgggaagacatcgatgtcgccgccgtcgcgggcgttaactacgccggcggcattttcgactggctcggcaagctgggggagaaaaacgtcaggacgacgctgagcaatctggcgcagctgctgcacgcggcgcgctatgcgccgcattacaccctcctgcacgccgcgcaaccggcgctgacgaccacgccttaa

SEQ ID NO: 114 - DNA, 1530 bp, Serratia marcescens 546
atggcagaaagtaatgcggcaattcaatcggctgcgattatcggcgcgggaacgatgggcagaggcatcgcttatcttttcgcgcaaaaaggcattcccacgatgctttataatcgcaacggcaataccctaaatcaagctcgcgaatatatcgcgcaagacctgaacaagaaagtcgaacagggcaagatcgcgctgcgggataaagacgcggtgctggccaatctgatgttcacttccgtgtttgaggccatcgccgacagcgagctggtgatagaaaccatcgccgagcaagaacaaaccaaacttgaggtgctggcggccatcgccgcagtggtcaagcccgacacgctgatcgccaccaatacctcctcactgtcgcttaacaagctgtcaactgcggtaacgcacaacgaacgctttatcggtttgcattttttcaaccccgcgccgctgatgaagctgattgaaatcattccggcctactttaccgcgcacgccaccacggaacgctgccgccaactggtggcggcgttggggaaacgcgatgtcgtctgccaggccacgccggggttcatcgtcaatcgcatggcccgcccctactacctggaagggttccgcctgttggaagaacatgtggcgcgcgcggcgcagatcgaccgcgccctcaaggccggcgggcgcttccgcatggggccgctcgagctgaccgattttatcggccaagacatcaactatcaggtcagccggcaaatctggcaggacatgcaatacgacccgcgctatacccctggtcatctgcagcgttcactggtcgatgccggtctgttggggaaaaagaacggccgctcctattttgccgccgaagaaaccgccccgccggtgacggccgccaacaatgcagacgtcgagacgctgcgcgtttacggcgagcaccctttttttaccctgttgcagcagcgagccgcgcttcagtggccacagctgcgcgtggaacaacggccggcattaccggggctgggagcggccgtccggatcaatgacgctttcaccgtcagcatcaccgatggccgcacggcgagccaactggccgagcagacggcagcggatgcctttgtggtcgatgtcgccctgaactacgccgacaccacgtatctggtggcggcgcacagccgccacgcttctgcggccaataaggcgctgtttttacgcctgctgcacacggcaatcccgcaggttgaatttatcaaggactctccggcgcttatcgtcgcccgcgtcctcagcagcctgatcaatgagtcggtgatcatggtggaaagcggcgtctgcagccgggaagacatcgatgtcgccgccgtcgcgggcgttaactacgccggcggcattttcgactggctcggcaaactgggggagaaaaacgtcaggacgacgctgagcaatctggcgcagctgctgcacgcggcgcgctatgcgccgcattacacccttctgcacgccgcgcaaccggcgctgacgaccacgccttaa

SEQ ID NO: 115 - DNA, 1530 bp, Serratia nematodiphila MB307
atggcagaaagtaatgcggcaattcaatcggctgcgattatcggcgcgggaacgatgggcagaggcatcgcttatcttttcgcgcaaaaaggcattcccacgatgctttataatcgcaacggcaataccctcaatcaagctcgcgaatatatcgcgcaagacctgaataagaaagtcgaacagggcaagatcgcgctgcgggataaagacgcggtgctggccaatctgatgttcacttccgtgtttgaggccatcgccgacagcgagctggtgatagaaaccatcgccgagcaagaacaaaccaaacttgaggtgctggcggccatcgccgcagtggtcaagcccgacacgctgatcgccaccaatacctcctcactgtcgctcaacaagctggcaacggcggtaacgcacagcgaacgctttatcggtttgcattttttcaaccccgcgccgctgatgaagctgattgaaatcattccggcctactttaccgcgcacgccaccacggaacgctgccgccaactggtggcggcgttggggaaacgcgatgtcgtctgccaggccacgccgggtttcatcgtcaatcgcatggcccgcccctactacctggaagggttccgcctgttggaagaacatgtggcgcgcgcggcgcagatcgaccgcgccctcaaggctggcgggcgcttccgcatggggccgctcgagctgaccgattttatcggccaagacatcaactatcaggtcagccggcaaatctggcaggacatgcaatacgacccgcgctatacccctggtcatctgcagcgttcactggtcgatgccggtctgttggggaaaaagaacggccgctcctattttgccgccgaagaaaccgccccgcaggtgacggccgccaacaatgcagacgtcgagacgctgcgcgtttacggcgagcatcctttttttaccctgttgcagcagcgagccgcgcttcagtggccacagctgcgcgtggaacaacggccggcattaccggggctgggagcggccgtccagatcaatgacgctttcaccgtcagcatcaccgatggccgcacggcgagccaactggccgagcagacggcagcggatgcctttgtggtcgatctcgccctgaactacgccgacaccacgtatctggtggcggcgcacagccgccacgcttctgcggccaataaggcgctgtttttacgcctgctgcacacggcaatcccgcaggttgaatttatcaaggactctccggcgcttatcgtcgcccgcgtcctcagcagcctgatcaatgagtcggtgatcatggtggaaagcggcgtctgcagccgggaagacatcgatgtcgccgccgtcgcgggcgttaactacgccggcggcattttcgactggctcggcaaactgggggagaaaaacgtcaggacgacgctgagcaatctggcgcagctgctgcacgcggcgcgctatgcgccgcattacacccttctgcacgccgcgcaaccggcgctgacgaccacgccttaa

SEQ ID NO: 116 - DNA, 1530 bp, Serratia marcescens VGH107
atggcagaaagtaatgcggcaattcaatcggctgcgattatcggcgcgggaacgatgggcagaggcatcgcttatcttttcgcgcaaaaaggcattcccacgatgctttataatcgcaacggcaataccctcaatcaagctcgcgaatatatcgcgcaagacctgaataagaaagtcgaacagggcaagatcgcgctgcaggataaggacgcggtgctggccaatctgatgttcacttccgtgtttgaggccatcgccgacagcgagctggtaatagaaaccatcgccgagcaagaacaaaccaaacttgaggtgctggcggccatcgccgcggtggtcaagcacgacacgctgatcgccaccaatacctcctcactgtcgctcaacaagctggcaactgcggtgacgcacagcgaacgctttatcggtttgcattttttcaaccccgcgccgctgatgaagctgattgaaatcattccggcctactttaccgcgcacgccaccacggaacgctgccgccaactggtggcggcgttggggaaacgcgatgtcgtctgccaggccacgccggggttcatcgtcaatcgcatggcccgcccctactacctggaagggttccgcctgttggaagaacatgtggcgcgcgcggcgcagatcgaccgcgccctcaaggccggcgggcgcttccgcatggggccgctcgagctgaccgattttattggccaagacattaactatcaggtcagccggcaaatctggcaggacatgcaatacgacccgcgctatacccctggtcatctgcagcgttcactggtcgatgccggtctgttggggaaaaagaacggccgctcctattttgccgccgaagaaaccgccccgccggtgacggccgccaacaatgcagacgtcgagacgctgcgcgtttacggcgagcatcctttttttaccctgttgcagcagcgagccgcgcttcagtggccacagctgcgcgtggaacaacggccggcattaccggggctgggagcggccgtccagatcaatgacgctttcaccgtaagcatcaccgatggccgcacggcgagccaactggccgagcagacggcagcggatgcctttgtggtcgatgtcgccctgaactacgccgacaccacgtatctggtggcggcgcacagccgccacgcttctgcggccaataaggcgctgtttttgcgcctgctgcacacggcaatcccgcaggttgaatttatcaaggactctccggcgcttatcgtcgcccgcgtcctcagcagcctgatcaatgagtcggtgatcatggtggaaagcggcgtctgcagccgggaagacatcgatgtcgccgccgtcgcgggcgttaactacgccggcggcattttcgactggctcggcaaactgggggagaaaaacgtcaggacgatgctgagcaatctggcgcagctgctgcacgcggcgcgctatgcgccgcattacaaccttctgcacgccgcgcaaccggcgctgacgaccacgccttaa

SEQ ID NO: 117 - DNA, 1530 bp, Serratia marcescens MCB
atggcagaaagtaatgcggcaattcaatcggctgcgattatcggcgcgggaacgatgggcagaggcatcgcttatcttttcgcgcaaaagggcattcgtacggtgctttataatcgcaacggcaataccctcaatcaggctcgcgaatatatcgcgcaagacctgaacaagaaagtcgaacagggcaagatcgcgctgcaggataaaagctcagtgctggccaatctggtgttctcgacggcgcttgaggctatcgccgacagcgagttggtgatagaaaccatcgccgagcatgaacaaaccaaacttgaggtgttggcggccatcgccgcggtggtcaagcccgatacgctgatcgccaccaatacctcctcactgtcgcttaacaagctggcaaccgcggtgacgcacagcgagcggtttatcggtttgcactttttcaaccctgcgccgctgatgaaactgattgaaatcatcccggcctactttaccgcacacgccaccacggaacgttgccgtcaactggtggccgcgttggggaaacgcgatgtcgtctgtcaggccacgccggggtttatcgttaaccgcatggcccgcccctactacctggaagggttccgcctgttggaagaacacgtggcgcgcgcgccgcagatcgaccgtgccctcaaggccggcggacacttccgcatggggccgctcgagctgaccgatttcatcggccaggacatcaactatcaggtcagtcggcaaatctggcaggacatgcaatacgacccgcgctatacccccggccatctgcagcgttcgctggtcgatgccggtctgttggggaaaaagaacggccgttcctattttaccgccgaagaaaccgccccgccggtgacggctgccatcggtgcagacgtcgagacgctgcgcatttacggcgaacatcctttttttaccctgttgcaacagcgggccgcacttcagtggccacagctgcgcgtggaacaacggccggccttaccaggcgtggggccggccgtccagatcaatgacgcattcaccgtcagcatcaccgacggccgtacggcgagccagttagccgagcagacgacggctgacgcttttgtggtcgatatcgccctgaactacgccgacacggcgtacctggttgcggcgcacaatcgccacgcctctgcggccaataaggcgctgtttttacgcctgttgcacaccgcaattccgcaggttgaatttatcaaagactccccggcgctgatcgtcgctcgcgtcctcagcagcctgatcaatgagtcggtgatcatggtggaaagcggcgtttgcagccgggaagacattgatgtcgccgccgtcgcgggcgttaactacgccggcggcattttcgactggctcagcaagctgggggagaaaaacgtcaggacgacgctgagcaatctggcgcagttgctgcacgcggcgcgttatgcgccgcattacacccttctgcacgccgcgcaaccggcgctgacgaccacgccttga

SEQ ID NO: 118 - DNA, 1530 bp, Serratia marcescens AH0650
atggcagaaagtaatgcggcaattcaatcggctgcgattatcggcgcgggaacgatgggcagaggcatcgcttatcttttcgcgcaaaaaggcattcgtacggtgctttataatcgcaacggcaataccctcaatcaggctcgcgaatatatcgcgcaagacctgaacaagaaagtcgaacagggcaagatcgcgctgcaggataaaagctcagtgctggccaatctggtgttctcgacggcgcttgaggctatcgccgacagcgagttggtgatagaaaccatcgccgagcatgaacaaaccaaacttgaggtgttggcggccatcgccgcggtggtcaagcccgatacgctgatcgccaccaatacctcctcactgtcgcttaacaagctggcaaccgcggtgacgcacagcgagcggtttatcggtttgcactttttcaaccctgcgccgctgatgaaactgattgaaatcatcccggcctactttaccgcacacgccaccacggaacgttgccgtcaactggtggccgcgttggggaaacgcgatgtcgtctgtcaggccacgccggggtttatcgttaaccgcatggcccgcccctactacctggaagggttccgcctgttggaagaacacgtggcgcgcgcgccgcagatcgaccgtgccctcaaggccggcggacacttccgcatggggccgctcgagctgaccgattttatcggccaggacatcaactatcaggtcagccggcaaatctggcaggacatgcaatacgacccgcgctatacccccggccatctgcagcgttcgctggtcgatgccggtctgttggggaaaaagaacggccgctcctattttgccgccgaagaaaccgccccgccagtgacggccgccatcgatgcagacgtcgagacgctgcgcgtttacggcgaacaccctttttttaccctgttgcaacagcgagccgcacgtcagtggccacagctgcgcgtggaacaacggccggccttaccgagcctggggccggccgtccagatcaatgacgcattcaccgtcagcatcaccgatggccgcacggcgagccagttagccgagcagacgacggctgacgcttttgtggtcgacatcgccctgaactacgccgacacggcgtatctggttgcggcgcacaatcgctatgcctctgcggccaataaggcgctgtttttacgcctgctgcacactgcgatcccgcaggttgaatttatcaaagactccccggcgctgatcgtcgctcgtgtcctcagcagcctgatcaatgagtcggtgatcatggtggaaagcggcgtttgcagccgggaagacattgatgtcgccgccgtcgcgggcgttaactacgccggcggcattttcgactggctcggcaaactgggggagaaaaacgtcaggacgacgctgagcaatctggcgcagctgctgcacgcagcgcgctatgcgccgcattacacccttctgcacgccgcgcaaccggcgctgacgaccacgccttga

SEQ ID NO: 119 - DNA, 1530 bp, Serratia marcescens UMH12
atggcagaaagtaatgcggaaattcaatcggctgcgattatcggcgcgggaacgatgggcagaggcatcgcttatcttttcgcgcaaaaaggcattcgtacggtgctttataatcgcaacggcaataccctcaatcaggctcgcgaatatatcgcgcaagacctgaacaagaaagtcgaacagggcaagatcgcgctgcaggataaaagctcagtgctggccaatctggtgttctcgacggcgcttgaggctatcgccgacagcgagttggtgatagaaaccatcgccgagcatgaacaaaccaaacttgaggtgttggcggccatcgccgcggtggtcaagcccgatacgctgatcgccaccaatacctcctcactgtcgcttaacaagctggcaaccgcggtgacgcacagcgagcggtttatcggtttgcactttttcaaccctgcgccgctgatgaaactgattgaaatcatcccggcctactttaccgcacacgccaccacggaacgttgccgtcaactggtggccgcgttggggaaacgcgatgtcgtctgtcaggccacgccggggtttatcgttaaccgcatggcccgcccctactacctggaagggttccgcctgttggaagaacacgtggcgcgcgcgccgcagatcgaccgtgccctcaaggccggcggacacttccgcatggggccgctcgagctgaccgattttatcggccaggacatcaactatcaggtcagccggcaaatctggcaggacatgcaatacgacccgcgctatacccccggccatctgcagcgttcgctggtcgatgccggtctgttggggaaaaagaacggccgctcctattttgccgccgaagaaaccgccccgccagtgacggccgccatcgatgcagacgtcgagacgctgcgcgtttacggcgaacaccctttttttaccctgttgcaacagcgagccgcacgtcagtggccacagctgcgcgtggaacaacggccggccttaccgagcctggggccggccgtccagatcaatgacgcattcaccgtcagcatcaccgatggccgcacggcgagccagttagccgagcagacgacggctgacgcttttgtggtcgacatcgccctgaactacgccgacacggcgtatctggttgcggcgcacaatcgctatgcctctgcggccaataaggcgctgtttttacgcctgctgcacactgcgatcccgcaggttgaatttatcaaagactccccggcgctgatcgtcgctcgtgtcctcagcagcctgatcaatgagtcggtgatcatggtggaaagcggcgtttgcagccgggaagacattgatgtcgccgccgtcgcgggcgttaactacgccggcggcattttcgactggctcggcaaactgggggagaaaaacgtcaggacgacgctgagcaatctggcgcagctgctgcacgcagcgcgctatgcgccgcattacacccttctgcacgccgcgcaaccggcgctgacgaccacgccttga

SEQ ID NO: 120 - DNA, 1530 bp, Serratia sp. OMLW3
atggcagaaagtaatgcggcaattcaatcggctgcgattatcggcgcgggaacgatgggcagaggcatcgcttatcttttcgcgcaaaaaggcattcgtacggtgctttataatcgcaacggcaataccctcaatcaggctcgcgaatatatcgcgcaagacctgaacaagaaagtcgaacagggcaagatcgcgctgcaggataaaagctcagtgctggccaatctggtgttctcgacggcgcttgtggctatcgccgacagcgagttggtgatagaaaccatcgccgagcatgaacaaaccaaacttgaggtgttggcggccatcgccgcggtggtcaagcccgatacgctgatcgccaccaatacctcctcactgtcgcttaacaagctggcaaccgcggtgacgcacagcgagcggtttatcggtttgcactttttcaaccctgcgccgctgatgaaactgattgaaatcatcccggcctactttaccgcacacgccaccacggaacgttgccgtcaactggtggccgcgttggggaaacgcgatgtcgtctgtcaggccacgccggggtttatcgtcaaccgcatggcccgcccctactacctggaagggttccgcctgttggaagagcacgtggcgcgcgcgccgcagatcgaccgtgccctcaaggccggcggacacttccgcatggggccgctcgagctgaccgattttatcggccaggacatcaactatcaggtcagccggcaaatctggcaggacatgcaatacgacccgcgctatacccccggccatctgcagcgttcgctggtcgatgccggtctgttggggaaaaagaacggccgctcctattttgccgccgaagaaaccgccccgccagtgacggccgccatcgatgcagacgtcgagacgctgcgcgtttacggcgaacaccctttttttaccctgttgcaacagcgagccgcacgtcagtggccacagctgcgcgtggaacaacggccggccttaccgagcctggggccggccgtccagatcaatgacgcattcaccgtcagcatcaccgatggccgcacggcgagccagttagccgagcagacgacggctgacgcttttgtggtcgacatcgccctgaactacgccgacacggcgtatctggttgcggcgcacaatcgctatgcctctgcggccaataaggcgctgtttttacgcctgctgcacactgcgatcccgcaggttgaatttatcaaagattccccggcgctgatcgtcgctcgcgtcctcagcagcctgatcaatgagtcggtgatcatggtggaaagcggcgtctgcagccgggaagacattgatgtcgccgccgtcgcgggcgttaactacgccggcggcattttcgactggctcggcaaactgggggagaaaaacgtcaggacgacgctgagcaatctggcgcagctgctgcacgcagcgcgctatgcgccgcattacacccttctgcacgccgcgcaaccggcgctgacgaccacgccttga

SEQ ID NO: 121 - DNA, 1530 bp, Serratia marcescens UMH11
atggcagaaagtaatgcggcaattcaatcggctgcgattatcggcgcgggaacgatgggcagaggcatcgcttatcttttcgcgcaaaaaggcattcgtacggtgctttataatcgcagcggcaataccctcaatcaggctcgcgaatatatcgcgcaagacctgaacaagaaagtcgaacagggcaagatcgcgctgcaggataaaagctcagtgctggccaatctggtgttctcgacggcgcttgtggctatcgccgacagcgagttggtgatagaaaccatcgccgagcatgaacaaaccaaacttgaggtgttggcggccatcgccgcggtggtcaagcccgatacgctgatcgccaccaatacctcctcactgtcgcttaacaagctggcaaccgcggtgacgcacagcgagcggtttatcggtttgcactttttcaaccctgcgccgctgatgaaactgattgaaatcatcccggcctactttaccgcacacgccaccacggaacgttgccgtcaactggtggccgcgttggggaaacgcgatgtcgtctgtcaggccacgccggggtttatcgtcaaccgcatggcccgcccctactacctggaagggttccgcctgttggaagagcacgtggcgcgcgcgccgcagatcgaccgtgccctcaaggccggcggacacttccgcatggggccgctcgagctgaccgattttatcggccaggacatcaactatcaggtcagccggcaaatctggcaggacatgcaatacgacccgcgctatacccccggccatctgcagcgttcgctggtcgatgccggtctgttggggaaaaagaacggccgctcctattttgccgccgaagaaaccgccccgccagtgacggccgccatcgatgcagacgtcgagacgctgcgcgtttacggcgaacaccctttttttaccctgttgcaacagcgagccgcacgtcagtggccacagctgcgcgtggaacaacggccggccttaccgagcctggggccggccgtccagatcaatgacgcattcaccgtcagcatcaccgatggccgcacggcgagccagttagccgagcagacgacggctgacgcttttgtggtcgacatcgccctgaactacgccgacacggcgtatctggttgcggcgcacaatcgctatgcctctgcggccaataaggcgctgtttttacgcctgctgcacactgcgatcccgcaggttgaatttatcaaagattccccggcgctgatcgtcgctcgcgtcctcagcagcctgatcaatgagtcggtgatcatggtggaaagcggcgtctgcagccgggaagacattgatgtcgccgccgtcgcgggcgttaactacgccggcggcattttcgactggctcggcaaactgggggagaaaaacgtcaggacgacgctgagcaatctggcgcaactgctgcacgcagcgcgctatgcgccgcattacacccttctgcacgccgcgcaaccggcgctgacgaccacgccttga

SEQ ID NO: 122 - DNA, 1530 bp, Serratia marcescens UMH1
atggcagaaagtaatgcggcaattcaatcggctgcgattatcggcgcgggaacgatgggcagaggtatcgcttatcttttcgcgcaaaaaggcattcgtacggtgctttataatcgcaacggcaataccctcaatcaggctcgcgaatatatcgcgcaagacctgaacaagaaagtcgaacagggcaagatcgcgctgcaggataaaagctcagtgctggccaatctggtgttctcgacggcgcttgaggctatcgccgacagcgagttggtgatagaaaccatcgctgagcatgaacaaaccaaacttgaggtgttggcggccatcgccgcggtggtcaagcccgatacgctgatcgccaccaatacctcctcactgtcgcttaacaagctggcaaccgcggtgacgcacagcgagcggtttatcggtttgcactttttcaaccctgcgccgctgatgaaactgattgaaatcatcccggcctactttaccgcacatgccaccacggaacgttgccgtcaactggtggccgcgttggggaaacgcgatgtcgtctgccaggccacgccggggtttatcgttaaccgcatggcccgcccctactacctggaagggttccgcctgttggaagaacacgtggcgcgcgcgccgcagatcgaccgtgccctcaaggccggcggacacttccgcatggggccgctcgagctgaccgattttatcggccaggacatcaactatcaggtcagccggcaaatctggcaggacatgcaatacgacccgcgctatacccccggccatctgcagcgttcgctggtcgatgccggtctgttggggaaaaagaacggccgctcctattttgccgccgaagaaaccgccccgccagtgacggccgccatcgatgcagacgtcgagacgctgcgcgtttacggcgaacaccctttttttaccctgttgcaacagcaagccgcacgtcagtggccacagctgcgcgtggaacaacggccggccttaccgagcctggggccggccgtccagatcaatggcgcattcaccgtcagcatcaccgatggccgcacggcgagccagttagccgagcagacgacggctgacgcttttgtgatcgacatcgccctgaactacgccgacacggcgtatctggttgcggcgcacaatcgctatgcctctgcggccaataaggcgctgtttttacgcctgctgcacactgcgatcccgcaggttgaatttatcaaagactccccggcgctgatcgtcgctcgtgtcctcagcagcctgatcaatgagtcggtgatcatggtggaaagcggcgtttgcagccgggaagacattgatgtcgccgccgtcgcgggcgttaactacgccggcggcattttcgactggctcggcaaactgggggagaaaaacgtcaggacgacgctgagcaatctggcgcagctgctgcacgcagcgcgctatgcgccgcattacacccttctgcacgccgcgcaaccggcgctgacgaccacgccttga

SEQ ID NO: 123 - DNA, 1530 bp, Serratia marcescens 2880STDY5683020
atggcagaaagtaatgcggcaattcaatcggctgcgattatcggcgcgggaacgatgggcagaggcatcgcttatcttttcgcgcaaaaaggcattcgcacggtgctttataatcgcaacggcaataccctcaatcaggctcgcgaatatatcgcgcaagacctgaacaagaaagtcgaacagggcaagatcgcgctgcaggataaaggcgcagtgctggccaatctggtgttcacctcggtgtttgagactatcgccgacagcgatctggtgatagaaaccatcgccgagcaagagcaaaccaaacttgaggtgctggcggccatcgccgcggcggtcaagcccgacacgctgatcgccaccaatacctcctcactgtcgcttaacaagctggcaaccgcggtgacgcacagcgagcggtttatcggtttgcactttttcaatcccgcgccgctgatgaaactgattgaaatcatcccggcctactttaccgcacgcgccaccaccgaacgttgccgtcagctggtagccgcgttggggaaacgcgatgtcgtctgccaggccacgccggggtttatcgtcaaccgcatggcccgcccctactacctggaagggttccgcctgttggaagaacacgtggcgcgcgcgccgcagatcgaccgcgccctcaaggccggcgggcactttcgcatggggccgctcgagctgaccgattttatcggccaggacatcaactatcaggtcagccggcaaatctggcaggacatgcaatacgatccgcgctatacccccggccatctgcagcgttcgctggtcgatgccggtctgttggggaaaaagaacggccgctcctattttgccgccgaagaaaacgccttaccggtaacggccgccaccgatgcagacgtcgagacgctgcgcgtttacggcgaacaccctttttttaccctgttgcaacagcgggccgcgcttcagtggccacggctgcgcgtggagcaacggccggccttaccgggcctggggccggccgtccagatcaatgaggctttcaccgtcagcgtcaccgatggccgcacggcgagccagttggcggagcagacggcggcggatgcctttgtggtcgatgtcgccctgaattacgccgacacggcgtatctggtggcagcgcacaaccgccacgcctctgcggccaataaggcgctgtttttacgcctgctgcacacggcaatcccgcaggttgaatttatcaaggactccccggcgctgatcgtcgcccgcgtcctcagcagcctgatcaacgagtcggtgatcatggtggaaagcggcgtctgcagccgggaagacatcgatgtcgccgccgtcgccggcgttaactacgccgacggcattttcggctggctcgatagcctgggggagaaaaacgtcaggacgacgctgagcaacctggcgcagctgctgcacgcggcacgctatgcgccgcattacacccttctgcacgccgcgcaaccggcgctgacgaccacgccttaa

SEQ ID NO: 124 - DNA, 1530 bp, Serratia marcescens 99
atggcagaaagtaatgcggcaattcaatcggctgcgattatcggtgcgggaacgatgggcagaggcatcgcttatcttttcgcgcaaaaaggcattcgcacggtgctttataatcgcaacggcaataccctcaatcaggctcgcgaatatatcgcgcaagacctgaacaagaaagtcgaacagggcaagatcgcgctgcaggataaaggcgcagtgctggccaatctggtgttcacctcggtgtttgagactatcgccgacagcgatctggtgatagaaaccatcgccgagcaagagcaaaccaaacttgaggtgctggcggccatcgccgcggcggtcaagcccgacacgctgatcgccaccaatacctcctcactgtcgcttaacaagctggcaaccgcggtgacgcacagcgagcggtttatcggtttgcactttttcaatcccgcgccgctgatgaaactgattgaaatcatcccggcctactttaccgcacgcgccaccaccgaacgttgccgtcagctggtggccgcgttggggaaacgcgatgtcgtctgccaggccacgccggggtttatcgtcaaccgcatggcccgcccctactacctggaagggttccgcctgttggaagaacacgtggcgcgcgcgccgcagatcgaccgcgccctcaaggccggcgggcactttcgcatggggccgctcgagctgaccgattttatcggccaggacatcaactatcaggtcagccggcaaatctggcaggacatgcaatacgatccgcgctatacccccggccatctgcagcgttcgctggtcgatgccggtctgttggggaaaaagaacggccgctcctattttgccgccgaagaaaacgccttaccggtaacggccgcctccaatgcagacgtcgagacgctgcgcgtttacggcgaacaccctttttttaccctgttgcaacagcgggccgcgcttcagtggccacggctgcgcgtggagcaacggccggccttaccgggtctggggccggccgtccagatcaatgaggctttcaccgtcagcgtcaccgatggccgcacggcgagccaattggcggagctgacggcggcggatgcctttgtggtcgatgtcgccctgaactacgccgacacggcgtatctggtggcagcgcacaaccgccacgcctctgcggccaataaggcgctgtttttacgcctgctgcacacggcaatcccgcaggttgaatttatcaaggactccccggcgctgatcgtcgcccgcgtcctcagcagcctgatcaacgagtcggtgatcatggtggaaagcggcgtctgcagccgggaagacatcgatgtcgccgccgtcgccggcgttaactacgccgacggcattttcggctggctcgatagcctgggggagaaaaacgtcaggacgacgctgagcaacctggcgcagctgctgcacgcggcacgctatgcgccgcattacacccttctacacgccgcgcaaccggtgctgacgaccacgccttaa

SEQ ID NO: 125 - DNA, 1530 bp, Serratia marcescens 374
atggcagaaagtaatgcggcaattcaatcggctgcgattatcggcgcgggaacgatgggcagaggcatcgcttatcttttcgcgcaaaagggcattcgtacggtgctttataatcgcaacggcaataccctcaatcaggctcgcgaatatatcgcgcaagacctgaacaagaaagtcgaacagggcaagatcgcgctgcaggataaaagctcagtgctggccaatctggtgttctcgacggcgcttgtggctatcgccgacagcgagttggtgatagaaaccatcgccgagcatgaacaaaccaaacttgaggtgttggcggccatcgccgcggtggtcaagcccgatacgctgatcgccaccaatacctcctcactgtcgcttaacaagctggcaaccgcggtgacgcacagcgagcggtttatcggtttgcactttttcaaccctgcgccgctgatgaaactgattgaaatcatcccggcctactttaccgcacacgccaccacggaacgttgccgtcaactggtggccgcgttggggaaacgcgatgtcgtctgtcaggccacgccggggtttatcgtcaaccgcatggcccgcccctactacctggaagggttccgcctgttggaagagcacgtggcgcgcgcgccgcagatcgaccgtgccctcaaggccggcggacacttccgcatggggccgctcgagctgaccgattttatcggccaggacatcaactatcaggtcagccggcaaatctggcaggacatgcaatacgacccgcgctatacccccggccatctgcagcgttcgctggtcgatgccggtctgttggggaaaaagaacggccgctcctattttgccgccgaagaaaccgccccgccagtgacggccgccatcgatgcagacgtcgagacgctgcgcgtttacggcgaacaccctttttttaccctgttgcaacagcaagccgcacgtcagtggccacagctgcgcgtggaacaacggccggccttaccgagcctggggccggccgtccagatcaatggcgcattcaccgtcagcatcaccgatggccgcacggcgagccagttagccgagcagacgacggctgacgcttttgtgatcgacatcgccctgaactacgccgacacggcgtatctggttgcggcgcacaatcgctatgcctctgcggccaataaggcgctgtttttacgcctactgcacactgcgatcccgcaggttgaatttatcaaagactccccggcgctgatcgtcgctcgtgtcctcagcagcctgatcaatgagtcggtgatcatggtggaaagcggcgtttgcagccgggaagacattgatgtcgccgccgtcgcgggcgttaactacgccggcggcattttcgactggctcggcaaactgggggagaaaaacgtcaggacgacgctgagcaatctggcgcagctgctgcacgcagcgcgctatgcgccgcattacacccttctgcacgccgcgcaaccggcgctgacgaccacgccttga

SEQ ID NO: 126 - DNA, 1530 bp, Serratia marcescens 2880STDY5683036
atggcagaaagtaatgcggcaattcaatcggctgcgattatcggtgcgggaacgatgggcagaggcatcgcttatcttttcgcgcaaaaaggcattcgcacggtgctttataatcgcaacggcaataccctcaatcaggctcgcgaatatatcgcgcaagacctgaacaagaaagtcgaacagggcaagatcgcgctgcaggataaaggcgcagtgctggccaatctggtgttcacctcggtgtttgagactatcgccgacagcgatctggtgatagaaaccatcgccgagcaagagcaaaccaaacttgaggtgctggcggccatcgccgcggcggtcaagcccgacacgctgctcgccaccaatacctcctcactgtcgcttaacaagctggcaaccgcggtgacgcacagcgagcggtttatcggtttgcactttttcaatcccgcgccgctgatgaaactgattgaaatcatcccggcctactttaccgcacgcgccaccaccgaacgttgccgtcagctggtggccgcgttggggaaacgcgatgtcgtctgccaggccacgccggggtttatcgtcaaccgcatggcccgcccctactacctggaagggttccgcctgttggaagaacacgtggcgcgcgcgccgcagatcgaccgcgccctcaaggccggcgggcactttcgcatggggccgctcgagctgaccgattttatcggccaggacatcaactatcaggtcagccggcaaatctggcaggacatgcaatacgatccgcgctatacccccggccatctgcagcgttcgctggtcgatgccggtctgttggggaaaaagaacggccgctcctattttgccgccgaagaaaacgccttaccggtaacggccgcctccaatgcagacgtcgagacgctgcgcgtttacggcgaacaccctttttttaccctgttgcaacagcgggccgcgcttcagtggccacggctgcgcgtggagcaacggccggccttaccgggtctggggccggccgtccagatcaatgaggctttcaccgtcagcgtcaccgatggccgcacggcgagccaattggcggagctgacggcggcggatgcctttgtggtcgatgtcgccctgaactacgccgacacggcgtatctggtggcagcgcacaaccgccacgcctctgcggccaataaggcgctgtttttacgcctgctgcacacggcaatcccgcaggttgaatttatcaaggactccccggcgctgatcgtcgcccgcgtcctcagcagcctgatcaacgagtcggtgatcatggtggaaagcggcgtctgcagccgggaagacatcgatgtcgccgccgtcgccggcgttaactacgccgacggcattttcggctggctcgatagcctgggggagaaaaacgtcaggacgacgctgagcaacctggcgcagctgctgcacgcggcacgctatgcgccgcattacacccttctacacgccgcgcaaccggtgctgacgaccacgccttaa

SEQ ID NO: 127 - DNA, 1530 bp, Serratia marcescens 2880STDY5683034
atggcagaaagtaatgcggcaattcaatcggctgcgattatcggcgcgggaacgatgggcagaggcatcgcttatcttttcgcgcaaaaaggcattcgcacggtgctttataatcgcaacggcaataccctcaatcaggctcgcgaatatatcgcgcaagacctgaacaagaaagtcgaacagggcaagatcgcgctgcaggataaaggcgcagtgctggccaatctggtgttcacctcggtgtttgagactatcgccgacagcgagctggtgatagaaaccatcgccgagcaagagcaaaccaaacttgaggtgctggcggccatcgccgcggcggtcaagcccgacacgctgatcgccaccaatacctcctcactgtcgcttaacaagctggcaaccgcggtgacgcacagcgagcggtttatcggtttgcactttttcaatcccgcgccgctgatgaaactgattgaaatcatcccggcctactttaccgcacgcgccaccaccgaacgctgccgtcagttggtggccgcgttggggaaacgcgatgtcgtctgccaggccacgccggggtttatcgtcaaccgcatggcccgcccctactacctggaagggttccgcctgttggaagaacacgtggcgcgcgcgccgcagatcgaccgcgccctcaaggccggcgggcactttcgcatggggccgctcgagctgaccgattttatcggccaggacatcaactatcaggtcagccggcaaatctggcaggacatgcaatacgatccgcgctatacccccggccatctgcagcgttcgctggtcgatgccggtctgttggggaaaaagaacggccgctcctattttgccgccgaagaaaacgccttaccggtaacggccgccaccgatgcagacgtcgagacgctgcgcatttacggcgaacaccctttttttaccctgttgcaacagcgggccgcgcttcagtggccacggctgcgcgtggagcaacggccggccttaccgggcctggggccggccgtccagatcaatgaggctttcaccgtcagcgtcaccgatggccgcacggcgagccagttggcggagctgacggcggcggatgcctttgtggtcgatgtcgccctgaactacgccgacacggcgtatctggtggcagcgcacaaccgccacgcctctgcggccaataaggcgctgtttttacgcctgctgcacacggcaatcccgcaggttgaatttatcaaggactccccggcgctgatcgtcgcccgcgtcctcagcagcctgatcaacgagtcggtgatcatggtggaaagcggcgtctgcagccgggaagacatcgatgtcgccgccgtcgccggcgttaactacgccgacggcattttcggctggctcgataacctgggggagaaaaacgtcaggacgacgctgagcaacctggcgcagctgctgcacgcggcacgctatgcgccgcattacacccttctacacgccgcgcaaccggcgctgacgaccacgccttaa

SEQ ID NO: 128 - DNA, 1530 bp, Serratia marcescens 2880STDY5682892
atggcagaaagtaatgcggcaattcaatcggctgcgattatcggtgcgggaacgatgggcagaggcatcgcttatcttttcgcgcaaaaaggcattcgcacggtgctttataatcgcaacggcaataccctcaatcaggctcgcgaatatatcgcgcaagacctgaacaagaaagtcgaacagggcaagatcgcgctgcaggataaaggcgcagtgctggccaatctggtgttcacctcggtgtttgagactatcgccgacagcgatctggtgatagaaaccatcgccgagcaagagcaaaccaaacttgaggtgctggcggccatcgccgcggcggtcaagcccgacacgctgatcgccaccaatacctcctcactgtcgcttaacaagctggcaaccgcggtgacgcacagcgagcggtttatcggtttgcactttttcaatcccgcgccgctgatgaaactgattgaaatcatcccggcctactttaccgcacgcgccaccaccgaacgttgccgtcagctggtagccgcgttggggaaacgcgatgtcgtctgccaggccacgccggggtttatcgtcaaccgcatggcccgcccctactacctggaagggttccgcctgttggaagaacacgtggcgcgcgcgccgcagatcgaccgcgccctcaaggccggcgggcactttcgcatggggccgctcgagctgaccgattttatcggccaggacatcaactatcaggtcagccggcaaatctggcaggacatgcaatacgatccgcgctatacccccggccatctgcagcgttcgctggtcgatgccggtctgttggggaaaaagaacggccgctcctattttgccgccgaagaaaacgccttaccggtaacggccgccaccgatgcagacgtcgagacgctgcgcgtttacggcgaacaccctttttttaccctgttgcaacagcgggccgcgcttcagtggccacggctgcgcgtggagcaacggccggccttaccgggcctggggccggccgtccagatcaatgaggctttcaccgtcagcgtcaccgatggccgcacggcgagccagttggcggagctgacggcggcggatgcctttgtggtcgatgtcgccctgaactacgccgacacggcgtatctggtggcagcgcacaaccgccacgcctctgcggccaataaggcgctgtttttacgcctgctgcacacggcaatcccgcaggttgaatttatcaaggactccccggcgctgatcgtcgcccgcgtcctcagcagcctgatcaacgagtcggtgatcatggtggaaagcggcgtctgcagccgggaagacatcgatgtcgccgccgtcgccggcgttaactacgccgacggcattttcggctggctcgatagcctgggggagaaaaacgtcaggacgacgctgagcaacctggcgcagctgctgcacgcggcacgctatgcgccgcattacacccttctgcacgccgcgcaaccggcgctgacgaccacgccttaa

SEQ ID NO: 129 - DNA, 1530 bp, Serratia marcescens SM39
atggcagaaagtaatgcggcaattcaatcggctgcgattatcggcgcgggaacgatgggcagaggcatcgcttatcttttcgcgcaaaaaggcattcgcacggtgctttataatcgcaacggcaataccctcaatcaggctcgcgaatatatcgtgcaagacctgaacaagaaagtcgaacagggcaagatcgcgctgcaggataaaggcgcagtgctggccaatctggtgttcacctcggtgtttgagactatcgccgacagcgagctggtgatagaaaccatcgccgagcaagagcaaaccaaacttgaggtgctggcggccatcgccgcggcggtcaagcccgacacgctgatcgccaccaatacctcctcactgtcgcttaacaagctggcaaccgcggtgacgcacagcgagcggtttatcggtttgcactttttcaatcccgcgccgctgatgaaactgattgaaatcatcccggcctactttaccgcacgcgccaccaccgaacgttgccgtcagctggtggccgcgttggggaaacgcgatgtcgtctgccaggccacgccggggtttatcgtcaaccgcatggcccgcccctactacctggaagggttccgcctgttggaagaacacgtggcgcgcgcgccgcagatcgaccgcgccctcaaggccggcgggcactttcgcatggggccgctcgagctgaccgattttatcggccaggacatcaactatcaggtcagccggcaaatctggcaggacatgcaatacgatccgcgctatacccccggccatctgcagcgttcgctggtcgatgccggtctgttggggaaaaagaacggccgctcctattttgccgccgaagaaaacgccttaccggtaacggccgccaccgatgcagacgtcgagacgctgcgcatttacggcgaacaccctttttttaccctgttgcaacagcgggccgcgcttcagtggccacggctgcgcgtggagcaacggccggccttaccgggcctggggccggccgtccagatcaatgaggctttcaccgtcagcgtcaccgatggccgcacggcgagccagttggcggagctgacggcggcggatgcctttgtggtcgatgtcgccctgaactacgccgacacggcgtatctggtggcagcgcacaaccgccacgcctctgcggccaataaggcgctgtttttacgcctgctgcacacggcaatcccgcaggttgaatttatcaaggactccccggcgctgatcgtcgcccgcgtcctcagcagcctgatcaacgagtcggtgatcatggtggaaagcggcgtctgcagccgggaagacatcgatgtcgccgccgtcgccggcgttaactacgccgacggcattttcggctggctcgataacctgggggagaaaaacgtcaggacgacgctgagcaacctggcgcagctgctgcacgcggcacgctatgcgccgcattacacccttctacacgccgcgcaaccggcgctgacgaccacgccttaa

SEQ ID NO: 130 - DNA, 1530 bp, Serratia marcescens 189
atggcagaaagtaatgcggcaattcaatcggctgcgattatcggcgcgggaacgatgggcagaggcatcgcttatcttttcgcgcaaaaaggcattcgcacggtgctttataatcgcaacggcaataccctcaatcaggctcgcgaatatatcgcgcaagacctgaacaagaaagtcgaacagggcaagatcgcgctgcaggataaaggcgcagtgctggccaatctggtgttcacctcggtgtttgagactatcgccgacagcgatctggtgatagaaaccatcgccgagcaagagcaaaccaaacttgaggtgctggcggccatcgccgcggcggtcaagcccgacacgctgatcgccaccaatacctcctcactgtcgcttaacaagctggcaaccgcggtgacgcacagcgagcggtttatcggtttgcactttttcaatcccgcgccgctgatgaaactgattgaaatcatcccggcctactttaccgcacgcgccaccaccgaacgttgccgtcagctggtagccgcgttggggaaacgcgatgtcgtctgccaggccacgccggggtttatcgtcaaccgcatggcccgcccctactacctggaagggttccgcctgttggaagaacacgtggcgcgcgcgccgcagatcgaccgcgccctcaaggccggcgggcactttcgcatggggccgctcgagctgaccgattttatcggccaggacatcaactatcaggtcagccggcaaatctggcaggacatgcaatacgatccgcgctatacccccggccatctgcagcgttcgctggtcgatgccggtctgttggggaaaaagaacggccgctcctattttgccgccgaagaaaacgccttaccggtaacggccgccaccgatgcagacgtcgagacgctgcgcatttacggcgaacaccctttttttaccctgttgcaacagcgggccgcgcttcagtggccacggctgcgcgtggagcaacggccggccttaccgggcctggggccggccgtccagatcaatgaggctttcaccgtcagcgtcaccgatggccgcacggcgagccagttggcggagctgacggcggcggatgcctttgtggtcgatgtcgccctgaactacgccgacacggcgtatctggtggcagcgcacaaccgccacgcctctgcggccaataaggcgctgtttttacgcctgctgcacacggcaatcccgcaggttgaatttatcaaggactccccggcgctgatcgtcgcccgcgtcctcagcagcctgatcaacgagtcggtgatcatggtggaaagcggcgtctgcagccgggaagacatcgatgtcgccgccgtcgccggcgttaactacgccgacggcattttcggctggctcgataacctgggggagaaaaacgtcaggacgacgctgagcaacctggcgcagctgctgcacgcggcacgctatgcgccgcattacacccttctacacgccgcgcaaccggcgctgacgaccacgccttaa

SEQ ID NO: 131 - DNA, 1530 bp, Serratia marcescens SMB2099
atggcagaaagtaatgcggcaattcaatcggctgcgattatcggcgcgggaacgatgggcagaggcatcgcttatcttttcgcgcaaaaaggcattcgcacggtgctttataatcgcaacggcaataccctcaatcaggctcgcgaatatatcgcgcaagacctgaacaagaaagtcgaacagggcaagatcgcgctgcaggataaaggcgcagtgctggccaatctggtgttcacctcggtgtttgagactatcgccgacagcgatctggtgatagaaaccatcgccgagcaagagcaaaccaaacttgaggtgctggcggccatcgccgcggcggtcaagcccgacacgctgatcgccaccaatacctcctcactgtcgcttaacaagctggcaaccgcggtgacgcacagcgagcggtttatcggtttgcactttttcaatcccgcgccgctgatgaaactgattgaaatcatcccggcctactttaccgcacgcgccaccaccgaacgttgccgtcagctggtggccgcgttggggaaacgcgatgtcgtctgccaggccacgccggggtttatcgtcaaccgcatggcccgcccctactacctggaagggttccgcctgttggaagaacacgtggcgcgcgcgccgcagatcgaccgcgccctcaaggccggcgggcactttcgcatggggccgctcgagctgaccgattttatcggccaggacatcaactatcaggtcagccggcaaatctggcaggacatgcaatacgatccgcgctatacccccggccatctgcagcgttcgctggtcgatgccggtctgttggggaaaaagaacggccgctcctattttgccgccgaagaaaacgccttaccggtaacggccgccaccgatgcagacgtcgagacgctgcgcgtttacggcgaacaccctttttttaccctgttgcaacagcgggccgcgcttcagtggccacggctgcgcgtggagcaacggccggccttaccgggcctggggccggccgtccagatcaatgaggctttcaccgtcagcgtcaccgatggccgcacggcgagccagttggcggagctgacggcggcggatgcctttgtggtcgatgtcgccctgaactacgccgacacggcgtatctggtggcagcgcacaaccgccacgcctctgaggccaataaggcgctgtttttacgcctgctgcacacggcaatcccgcaggttgaatttatcaaggactccccggcgctgatcgtcgcccgcgtcctcagcagcctgatcaacgagtcggtgatcatggtggaaagcggcgtctgcagccgggaagacatcgatgtcgccgccgtcgccggcgttaactacgccgacggcattttcggctggctcgatagcctgggggagaaaaacgtcaggacgacgctgagcaacctggcgcagctgctgcacgcggcacgctatgcgccgcattacacccttctacacgccgcgcaaccggcgctgacgaccacgccttaa

SEQ ID NO: 132 - DNA, 1530 bp, Serratia marcescens 2880STDY5682862
atggcagaaagtaatgcggcaattcaatcggctgcgattatcggcgcgggaacgatgggcagaggcatcgcttatcttttcgcgcaaaaaggcattcgcacggtgctttataatcgcaacggcaataccctcaatcaggctcgcgaatatatcgtgcaagacctgaacaagaaagtcgaacagggcaagatcgcgctgcaggataaaggcgcagtgctggccaatctggtgttcacctcggtgtttgagaccattgccgacagcgagctggtgatagaaaccatcgccgagcaagagcaaaccaaacttgaggtgctggcggccatcgccgcggcggtcaagcccgacacgctgatcgccaccaatacctcctcactgtcgcttaacaagctggcaaccgcggtgacgcacagcgagcggtttatcggtttgcactttttcaatcccgcgccgctgatgaaactgattgaaatcatcccggcctactttaccgcacgcgccaccaccgaacgttgccgtcagctggtagccgcgttggggaaacgcgatgtcgtctgccaggccacgccggggtttatcgtcaaccgcatggcccgcccctactacctggaagggttccgcctgttggaagaacacgtggcgcgcgcgccgcagatcgaccgcgccctcaaggccggcgggcactttcgcatggggccgctcgagctgaccgattttatcggccaggacatcaactatcaggtcagccggcaaatctggcaggacatgcaatacgatccgcgctatacccccggccatctgcagcgttcgctggtcgatgccggtctgttggggaaaaagaacggccgctcctattttgccgccgaagaaaacgccttaccggtaacggccgccaccgatgcagacgtcgagacgctgcgcgtttacggcgaacaccctttttttaccctgttgcaacagcgggccgcgcttcagtggccacggctgcgcgtggagcaacggccggccttaccgggcctggggccggccgtccagatcaatgaggctttcaccgtcagcgtcaccgatggccgcacggcgagccagttggcggagctgacggcggcggatgcctttgtggtcgatgtcgccctgaactacgccgacacggcgtatctggtggcagcgcacaaccgccacgcctctgcggccaataaggcgctgtttttacgcctgctgcacacggcaatcccgcaggttgaatttatcaaggactccccggcgctgatcgtcgcccgcgtcctcagcagcctgatcaacgagtcggtgatcatggtggaaagcggcgtctgcagccgggaagacatcgatgtcgccgccgtcgctggcgttaactacgccgacggcattttcggctggctcgatagcctgggggagaaaaacgtcaggacgacgctgagcaacatggcgcagctgctgcacgcggcacgctatgcgccgcattacacccttctgcacgccgcgcaaccggcgctgatgaccacgccttaa

SEQ ID NO: 133 - DNA, 1530 bp, Serratia marcescens SE4145
atggcagaaagtaatgcggaaattcaatcggctgcgattatcggcgcgggaacgatgggcagaggcatcgcttatcttttcgcgcaaaaaggcattcgcacggtgctttataatcgcaacggcaataccctcaatcaggctcgcgaatatatcgtgcaagacctgaacaagaaagtcgaacagggcaagatcgcgctgcaggataaaggcgcagtgctggccaatctggtgttcacctcggtgtttgagactatcgccgacagcgagctggtgatagaaaccatcgccgagcaagagcaaaccaaacttgaggtgctggcggccatcgccgcggcggtcaagcccgacacgctgatcgccaccaatacctcctcactgtcgcttaacaagctggcaaccgcggtgacgcacagcgagcggtttatcggtttgcactttttcaatcccgcgccgctgatgaaactgattgaaatcatcccggcctactttaccgcacgcgccaccaccgaacgttgccgtcagctggtagccgcgttggggaaacgcgatgtcgtctgccaggccacgccggggtttatcgtcaaccgcatggcccgcccctactacctggaagggttccgcctgttggaagaacacgtggcgcgcgcgccgcagatcgaccgcgccctcaaggccggcgggcactttcgcatggggccgctcgagctgaccgattttatcggccaggacatcaactatcaggtcagccggcaaatctggcaggacatgcaatacgatccgcgctatacccccggccatctgcagcgttcgctggtcgatgccggtctgttggggaaaaagaacggccgctcctattttgccgccgaagaaaacgccttaccggtaacggccgccaccgatgcagacgtcgagacgctgcgcatttacggcgaacaccctttttttaccctgttgcaacagcgggccgcgcttcagtggccacggctgcgcgtggagcaacggccggccttaccgggcctggggccggccgtccagatcaatgaggctttcaccgtcagcgtcaccgatggccgcacggcgagccagttggcggagctgacggcggcggatgcctttgtggtcgatgtcgccctgaactacgccgacacggcgtatctggtggcagcgcacaaccgccacgcctctgcggccaataaggcgctgtttttacgcctgctgcacacggcaatcccgcaggttgaatttatcaaggactccccggcgctgatcgtcgcccgcgtcctcagcagcctgatcaacgagtcggtgatcatggtggaaagcggcgtctgcagccgggaagacatcgatgtcgccgccgtcgccggcgttaactacgccgacggcattttcggctggctcgataacctgggggagaaaaacgtcaggacgacgctgagcaacctggcgcagctgctgcacgcggcacgctatgcgccgcattacacccttctacacgccgcgcaaccggcgctgacgaccacgccttaa

SEQ ID NO: 134 - DNA, 1530 bp, Serratia marcescens 2880STDY5682876
atggcagaaagtaatgcggcaattcaatcggctgcgattatcggtgcgggaacgatgggcagaggcatcgcttatcttttcgcgcaaaaaggcattcgcacggtgctttataatcgcaacggcaataccctcaatcaggctcgcgaatatatcgcgcaagacctgaacaagaaagtcgaacagggcaagatcgcgctgcagggtaaaggcgcagtgctggccaatctggtgttcacctcggtgtttgagactatcgccgacagcgatctggtgatagaaaccatcgccgagcaagagcaaaccaaacttgaggtgctggcggccatcgccgcggcggtcaagcccgacacgctgatcgccaccaatacctcctcactgtcgcttaacaagctggcaaccgcggtgacgcacagcgagcggtttatcggtttgcactttttcaatcccgcgccgctgatgaaactgattgaaatcatcccggcctactttaccgcacgcgccaccaccgaacgttgccgtcagctggtagccgcgttggggaaacgcgatgtcgtctgccaggccacgccggggtttatcgtcaaccgcatggcccgcccctactacctggaagggttccgcctgttggaagaacacgtggcgcgcgcgccgcagatcgaccgcgccctcaaggccggcgggcactttcgcatggggccgctcgagctgaccgattttatcggccaggacatcaactatcaggtcagccggcaaatctggcaggacatgcaatacgatccgcgctatacccccggccatctgcagcgttcgctggtcgatgccggtctgttggggaaaaagaacggccgctcctattttgccgccgaagaaaacgccttaccggtaacggccgccaccgatgcagacgtcgagacgctgcgcgtttacggcgaacaccctttttttaccctgttgcaacagcgggccgcgcttcagtggccacggctgcgcgtggagcaacggccggccttaccgggcctggggccggccgtccagatcaatgaggctttcaccgtcagcgtcaccgatggccgcacggcgagccagttggcggagctgacggcggcggatgcctttgtggtcgatgtcgccctgaactacgccgacacggcgtatctggtggcagcgcacaaccgccacgcctctgcggccaataaggcgctgtttttacgcctgctgcacacggcaatcccgcaggttgaatttatcaaggactccccggcgctgatcgtcgcccgcgtcctcagcagcctgatcaacgagtcggtgatcatggtggaaagcggcgtctgcagccgggaagacatcgatgtcgccgccgtcgccggcgttaactacgccgacggcattttcggctggctcgatagcctgggggagaaaaacgtcaggacgacgctgagcaacctggcgcagctgctgcacgcggcacgctatgcgccgcattacacccttctgcacgccgcgcaaccggcgctgacgaccacgccttaa

SEQ ID NO: 135 - DNA, 1530 bp, Serratia marcescens 709
atggcagaaagtaatgcggcaattcaatcggctgcgattatcggcgcgggaacgatgggcagaggcatcgcttatcttttcgcgcaaaaaggcattcgcacggtgctttataatcgcaacggcaataccctcaatcaggctcgcgaatatatcgcgcaagacctgaacaagaaagtcgaacagggcaagatcgcgctgcaggataaaggcgcagtgctggccaatctggtgttcacctcggtgtttgagactatcgccgacagcgatctggtgatagaaaccatcgccgagcaagagcaaaccaaacttgaggtgctggcggccatcgccgcggcggtcaagcccgacacgctgatcgccaccaatacctcctcactgtcgcttaacaagctggcaaccgcggtgacgcacagcgagcggtttatcggtttgcactttttcaatcccgcgccgctgatgaaactgattgaaatcatcccggcctactttaccgcacgcgccaccaccgaacgttgccgtcagctggtagccgcgttggggaaacgcgatgtcgtctgccaggccacgccggggtttatcgtcaaccgcatggcccgcccctactacctggaagggttccgcctgttggaagaacacgtggcgcgcgcgccgcagatcgaccgcgccctcaaggccggcgggcactttcgcatggggccgctcgagctgaccgattttatcggccaggacatcaactatcaggtcagtcggcaaatctggcaggacatgcaatacgatccgcgctatacccccggccatctgcagcgttcgctggtcgatgccggtctgttggggaaaaagaacggccgctcctattttgccgccgaagaaaacgccttaccggtaacggccgccaccgatgcagacgtcgagacgctgcgcgtttacgacgaacaccctttttttaccctgttgcaacagcgggccgcgcttcagtggccacggctgcgcgtggagcaacggccggccttaccgggcctggggccggccgtccagatcaatgaggctttcaccgtcagcgtcaccgatggccgcacggcgagccagttggcggagctgacggcggcggatgcctttgtggtcgatgtcgccctgaactacgccgacacggcgtatctggtggcagcgcacaaccgccacgcctctgcggccaataaggcgctgtttttacgcctgctgcacacggcaatcccgcaggttgaatttatcaaggactccccggcgctgatcgtcgcccgcgtcctcagcagcctgatcaacgagtcggtgatcatggtggaaagcggcgtctgcagccgggaagacatcgatgtcgccgccgtcgccggcgttaactacgccgacggcattttcggctggctcgatagcctgggggagaaaaacgtcaggacgacgctgagcaacctggcgcagctgctgcacgcggcacgctatgcgccgcattacacccttctgcacgccgcgcaaccggcgctgacgaccacgccttaa

SEQ ID NO: 136 - DNA, 1530 bp, Serratia marcescens MGH136
atggcagaaagtaatgcggcaattcaatcggctgcgattatcggcgcgggaacgatgggcagaggcatcgcttatcttttcgcgcaaaaaggcattcgcacggtgctttataatcgcaacggcaataccctcaatcaggctcgcgaatatatcgcgcaagacctgaacaagaaagtcgaacaggacaagatcgcgctgcaggataaaggcgcagtgctggccaatctggtgttcacctcggtgtttgagactatcgccgacagcgatctggtgatagaaaccatcgccgagcaagagcaaaccaaacttgaggtgctggcggccatcgccgcggcggttaagcccgacacgctgatcgccaccaatacctcctcactgtcgcttaacaagctggcaaccgcggtgacgcacagcgagcggtttatcggtttgcactttttcaatcccgcgccgctgatgaaactgattgaaatcatcccggcctactttaccgcacgcgtcaccaccgaacgttgccgtcagctggtggccgcgttggggaaacgcgatgtcgtctgccaggccacgccggggtttatcgtcaaccgcatggcccgcccctactacctggaagggttccgtctgttagaagaacacgtggcgcgcgcgccgcagatcgaccgcgccctcaaggccggcgggcactttcgcatggggccgctcgagctgaccgattttatcggccaggacatcaactatcaggtcagccggcaaatctggcaggacatgcaatacgatccgcgctatacccccggccatctgcagcgttcgctggtcgatgccggtctgttggggaaaaagaacggccgctcctattttgccgccgaagaaaacgccttaccggtaacggccgccaccgatgcagacgtcgagacgctgcgcgtttacggcgaacaccctttttttaccctgttgcaacagcgggccgcgcttcagtggccacggctgcgcgtggagcaacggccggccttaccgggcctggggccggccgtccagatcaatgaggctttcaccgtcagcgtcaccgatggccgcacggcgagccagttggcggagctgacggcggcggatgcctttgtggtcgatgtcgccctgaactacgccgacacggcgtatctggtggcagcgcacaaccgccacgcctctgcggccaataaggcgctgtttttacgcctgctgcacacggcaatcccgcaggttgaatttatcaaggactccccggcgctgatcgtcgcccgcgtcctcagcagcctgatcaacgagtcggtgatcatggtggaaagcggcgtctgcagccgggaagacatcgatgtcgccgctgtcgccggcgttaactacgccgacggcattttcggctggctcgatagcctgggggagaaaaacgtcagaacgacgctgagcaacctggcgcagctgctgcacgcggcacgctatgcgccgcattacacccttctgcacgccgcgcaaccggcgctgacgaccacgccttaa

SEQ ID NO: 137 - DNA, 1530 bp, Serratia marcescens 2880STDY5682884
atggcagaaagtaatgcggcaattcaatcggctgcgattatcggcgcgggaacgatgggcagaggcatcgcttatcttttcgcgcaaaaaggcattcgcacggtgctttataatcgcaacggcaataccctcaatcaggctcgcgaatatatcgcgcaagacctgaacaagaaagtcgaacagggcaagatcgcgctgcaggataaaggcgcagtgctggccaatctggtgttcacctcggtgtttgagactatcgccgacagcgagctggtgatagaaaccatcgccgagcaagagcaaaccaaacttgaggtgctggcggccatcgccgcggcggtcaagcccgacacgctgatcgccaccaatacctcctcactgtcgcttaacaagctggcaaccgcggtgacgcacagcgagcggtttatcggtttgcactttttcaatcccgcgccgctgatgaaactgattgaaatcatcccggcctactttaccgcacgcgccaccaccgaacgctgccgtcagttggtggccgcgttggggaaacgcgatgtcgtctgccaggccacgccggggtttatcgtcaaccgcatggcccgcccctactacctggaagggttccgcctgttggaagaacacgtggcgcgcgcgccgcagatcgaccgcgccctcaaggccggcgggcactttcgcatggggccgctcgagctgaccgattttatcggccaggacatcaactatcaggtcagccggcaaatctggcaggacatgcaatacgatccgcgctatacccccggccatctgcagcgttcgctggtcgatgccggtctgttggggaaaaagaacggccgctcctattttgccgccgaagaaaacgccttaccggtaacggccgccaccgatgcagacgtcgagacgctgcgcatttacggcgaacaccctttttttaccctgttgcaacagcgggccacgcttcagtggccacggctgcgcgtggagcaacggccggccttaccgggcctggggccggccgtccagatcaatgaggctttcaccgtcagcgtcaccgatggccgcacggcgagccagttggcggagctgatggcggcggatgcctttgtggtcgatgtcgccctgaactacgccgacacggcgtatctggtggcagcgcacaaccgccacgcctctgcggccaataaggcgctgtttttacgcctgctgcacacggcaatcccgcaggttgaatttatcaaggactccccggcgctgatcgtcgcccgcgtcctcagcagcctgatcaacgagtcggtgatcatggtggaaagcggcgtctgcagtcgggaagacatcgatgtcgccgccgtcgccggcgttaactacgccgacggcattttcggctggctcgatagcctgggggagaaaaacgtcaggatgacgctgagcaacctggcgcagctgctgcacgcggcacgctatgcgccgcattacacccttctacacgccgcgcaaccggcgctgacgaccacgccttaa

SEQ ID NO: 138 - DNA, 1530 bp, Serratia marcescens D-3
atggcagaaagtaatgcggcaattcaatcggctgcgattatcggcgcgggaacgatgggcagaggcatcgcttatcttttcgcgcaaaaaggcattcgcacggtgctttataatcgcaacggcaataccctcaatcaggctcgcgaatatatcgcgcaagacctgaacaagaaagtcgaacagggcaagatcgcgctgcaggataaaggcgcagtgctggccaatctggtgttcacctcggtgtttgagactatcgccgacagcgatctggtgatagaaaccatcgccgagcaagagcaaaccaaacttgaggtgctggcggccatcgccgcggcggtcaagcccgacacgctgatcgccaccaatacctcctcactgtcgcttaacaagctggcaaccgcggtgacgcacagcgagcggtttatcggtttgcactttttcaatcccgcgccgctgatgaaactgattgaaatcatcccggcctactttaccgcacgcgccaccaccgaacgttgccgtcagctggtggccgcgttggggaaacgcgatgtcgtctgccaggccacgccggggtttatcgtcaaccgcatggcccgcccctactacctggaagggttccgcctgttggaagaacacgtggcgcgcgcgccgcagatcgaccgcgccctcaaggccggcgggcactttcgcatggggccgctcgagctgaccgattttatcggccaggacatcaactatcaggtcagccggcaaatctggcaggacatgcaatacgatccgcgctatacccccggccatctgcagcgttcgctggtcgatgccggtctgttggggaaaaagaacggccgctcctattttgccgccgaagaaaacgccttaccggtaacggccgccatcgatgcagacgtcgagacgctgcgcgtttacggcgaacaccctttttttaccctgttgcaacagcgggccgcgcttcagtggccacggctgcgcgtggagcaacggccggccttaccgggcctggggccggccgtccagatcaatgaggctttcaccgtcagcgtcaccgatggccgcacggcgagccagttggcggagctgacggcggcggatgcctttgtggtcgatgtcgccctgaactacgccgacacggcgtatctggtggcagcgcacaaccgccacgcctctgcggccaataaggcgctgtttttacgcctgctgcacacggcaatcccgcaggttgaatttatcaaggactccccggcgctgatcgtcgcccgcgtcctcagcagcctgatcaacgagtcggtgatcatggtggaaagcggcgtctgcagccgggaagacatcgatgtcgccgccgtcgccggcgttaactacgccgacggcattttcggcttgctcgatagcctgggggagaaaaacgtcaggacgacgctgagcaacctggcgcagctgctgcacgcggcacgctatgcgccgcattacacccttctacacgccgcgcaaccggcgctgacgaccacgccttaa

SEQ ID NO: 139 - DNA, 1530 bp, Serratia marcescens 2880STDY5682957
atggcagaaagtaatgcggcaattcaatcggctgcgattatcggcgcgggaacgatgggcagaggcatcgcttatcttttcgcacaaaaaggcattcgcacggtgctttataatcgcaacggcaataccctcaatcaggctcgcgaatatatcgagctagacctgaacaagaaagtcgaacagggcaagatcgcgctgcaggataaaggcgcggtgctggccaatctggtgttcacctcggcgtttgagaccattgccgacagcgagctggtgatagaaaccatcgccgagcaagagcaaaccaaacttgaggtgctggcggccatcgccgcggcggtcaagcccgacacgctgatcgccaccaatacctcctcactgtcgcttaacaagctggcaaccgcggtgacgcacagcgagcggtttatcggtttgcactttttcaatcccgcgccgctgatgaaactgattgaaatcatcccggcctactttaccgcacgcgccaccaccgaacgttgccgtcagctggtagccgcgttggggaaacgcgatgtcgtctgccaggccacgccggggtttatcgtcaaccgcatggcccgcccctactacctggaagggttccgcctgttggaagaacacgtggcgcgcgcgccgcagatcgaccgcgccctcaaggccggcgggcactttcgcatggggccgctcgagctgaccgattttatcggccaggacatcaactatcaggtcagccggcaaatctggcaggacatgcaatacgatccgcgctatacccccggccatctgcagcgttcgctggtcgatgccggtctgttggggaaaaagaacggccgctcctattttgccgccgaagaaaacgccttaccggtaacggccgccaccgatgcagacgtcgagacgctgcgcgtttacggcgaacaccctttttttaccctgttgcaacagcgggccgcgcttcagtggccacggctgcgcgtggagcaacggccggccttaccgggcctggggccggccgtccagatcaatgaggctttcaccgtcagcgtcaccgatggccgcacggcgagccagttggcggagctgacggcggcggatgcctttgtggtcgatgtcgccctgaactacgccgacacggcgtatctggtggcagcgcacaaccgccacgcctctgcggccaataaggcgctgtttttacgcctgctgcacacggcaatcccgcaggttgaatttatcaaggactccccggcgctgatcgtcgcccgcgtcctcagcagcctgatcaacgagtcggtgatcatggtggaaagcggcgtctgcagccgggaagacatcgatgtcgccgccgtcgccggcgttaactacgccgacggtattttcggctggctcgatagcctgggggagaaaaacgtcaggacgacgctgagcaacctggcgcagctgctgcacgcggcacgctatgcgccgcattacacccttctacacgccgcgcaaccggcgctgacgaccacgccttaa

SEQ ID NO: 140 - DNA, 1530 bp, Serratia marcescens YDC563
atggcagaaagtaatgcagcaattcagtcggctgcgattatcggcgcgggaacgatgggcagaggcatcgcttatcttttcgcacaaaaaggcattcgcacggtgctttataatcgcaacggcaataccctcaatcaggctcgcgaatatatcgagctagacctgaacaagaaagtcgaacagggcaagatcgcgctgcaggataaaggcgcggtgctggccaatctggtgttcacctcggcgtttgagaccattgccgacagcgagctggtgatagaaaccatcgccgagcaagagcaaaccaaacttgaggtgctggcggccatcgccgcggcggtcaagcccgacacgctgatcgccaccaatacctcctcactgtcgcttaacaagctggcaaccgcggtgacgcacagcgagcggtttatcggtttgcactttttcaatcccgcgccgctgatgaaactgattgaaatcatcccggcctactttaccgcacgcgccaccaccgaacgttgccgtcagctggtagccgcgttggggaaacgcgatgtcgtctgccaggccacgccggggtttatcgtcaaccgcatggcccgcccctactacctggaagggttccgcctgttggaagaacacgtggcgcgcgcgccgcagatcgaccgcgccctcaaggccggcgggcactttcgcatggggccgctcgagctgaccgattttatcggccaggacatcaactatcaggtcagccggcaaatctggcaggacatgcaatacgatccgcgctatacccccggccatctgcagcgttcgctggtcgatgccggtctgttggggaaaaagaacggccgctcctattttgccgccgaagaaaacgccttaccggtaacggccgccaccgatgcagacgtcgagacgctgcgcgtttacggcgaacaccctttttttaccctgttgcaacagcgggccgcgcttcagtggccacggctgcgcgtggagcaacggccggccttaccgggcctggggccggccgtccagatcaatgaggctttcaccgtcagcgtcaccgatggccgcacggcgagccagttggcggagcagacggcggcggatgcctttgtggtcgatgtcgccctgaattacgccgacacggcgtatctggtggcagcgcacaaccgccacgcctctgcggccaataaggcgctgtttttacgcctgctgcacacggcaatcccgcaggttgaatttatcaaggactccccggcgctgatcgtcgcccgcgtcctcagcagcctgatcaacgagtcggtgatcatggtggaaagcggcgtctgcagccgggaagacatcgatgtcgccgccgtcgctggcgttaactacgccgacggcattttcggctggctcgatagcctgggggagaaaaacgtcaggacgacgctgagcaacatggcgcagctgctgcacgcggcacgctatgcgccgcattacacccttctgcacgccgcgcaaccggcgctgatgaccacgccttaa

SEQ ID NO: 141 - DNA, 1530 bp, Serratia marcescens 2880STDY5683035
atggcagaaagtaatgcggcaattcaatcggctgcgattatcggcgcgggaacgatgggcagaggcatcgcttatcttttcgcgcaaaaaggcattcgcacggtgctttataatcgcaacggcaataccctcaatcaggctcgcgaatatatcgcgcaagacctgaacaagaaagtcgaacagggcaagatcgcgctgcaggataaaggcgcagtgctggccaatctggtgttcacctcggtgtttgagactatcgccgacagcgatctggtgatagaaaccatcgccgagcaagagcaaaccaaacttgaggtgctggcggccatcgccgcggcggtcaagcccgacacgctgatcgccaccaatacctcctcactgtcgcttaacaagctggcaaccgcggtgacgcacagcgagcggtttatcggtttgcactttttcaatcccgcgccgctgatgaaactgattgaaatcatcccggcctactttaccgcacgcgccaccaccgaacgttgccgtcagctggtggccgcgttggggaaacgcgatgtcgtctgccaggccacgccggggtttatcgtcaaccgcatggcccgcccctactacctggaagggttccgcctgttggaagaacacgtggcgcgcgcgccgcagatcgaccgcgccctcaaggccggcgggcactttcgcatggggccgctcgagctgaccgattttatcggccaggacatcaactatcaggtcagccggcaaatctggcaggacatgcaatacgatccgcgctatacccccggccatctgcagcgttcgctggtcgatgccggtctgttggggaaaaagaacggccgctcctattttgccgccgaagaaaacgccttaccggtaacggccgccatcgatgcagacgtcgagacgctgcgcgtttacggcgaacaccctttttttaccctgttgcaacagcgggccgcgcttcagtggccacggctgcgcgtggagcaacggccggccttaccgggcctggggccggccgtccagatcaatgaggctttcaccgtcagcgtcaccgatggccgcacggcgagccagttggcggagctgacggcggcggatgtctttgtggtcgatgtcgccctgaactacgccgacacggcgtatctggtggcagcgcacaaccgccacgcctctgcggccaataaggcgctgtttttacgcctgctgcacacggcaatcccgcaggttgaatttatcaaggactccccggcgctgatcgtcgcccgcgtcctcagcagcctgatcaacgagtcggtgatcatggtggaaagcggcgtctgcagccgggaagacatcgatgtcgccgccgtcgccggcgttaactacgccgacggcattttcggcttgctcgatagcctgggggagaaaaacgtcaggacgacgctgagcaacctggcgcagctgctgcacgcggcacgctatgcgccgcattacacccttctacacgccgcgcaaccggcgctgacgaccacgccttaa

SEQ ID NO: 142 - DNA, 1530 bp, Serratia marcescens 2880STDY5682930
atggcagaaagtaatgcggcaattcaatcggctgcgattatcggcgcgggaacgatgggcagaggcatcgcttatcttttcgcgcaaaaaggcattcgcacggtgctttataatcgcaacggcaataccctcaatcaggctcgcgaatatatcgcgcaagacctgaacaagaaagtcgaacagggcaagatcgcgctgcaggataaaggcgcagtgctggccaatctggtgttcacctcggtgtttgagactatcgccgacagcgatctggtgatagaaaccatcgccgagcaagagcaaaccaaacttgaggtgctggcggccatcgccgcggcggtcaagcccgacacgctgatcgccaccaatacatcctcactgtcgcttaacaagctggcaaccgcggtgacgcacagcgagcggtttatcggtttgcactttttcaatcccgcgccgctgatgaaactgattgaaatcatcccggcctactttaccgcacgcgccaccaccgaacgttgccgtcagctggtggccgcgttggggaaacgcgatgtcgtctgccaggccacgccggggtttatcgtcaaccgcatggcccgcccctactacctggaagggttccgcctgttggaagaacacgtggcgcgcgcgccgcagatcgaccgcgccctcaaggccggcgggcactttcgcatggggccgctcgagctgaccgattttatcggccaggacatcaactatcaggtcagccggcaaatctggcaggacatgcaatacgatccgcgctatacccccggccatctgcagcgttcgctggtcgatgccggtctgttggggaaaaagaacggccgctcctattttgccgccgaagaaaacgccttaccggtaacggccgccaccgatgcagacgtcgagacgctgcgcgtttacggcgaacaccctttttttaccctgttgcaacagcgggccgcgcttcagtggccacggctgcgcgtggagcaacggccggccttaccgggcctggggccggccgtccagatcaatgaggctttcaccgtcagcgtcaccgatggccgcacggcgagccagttggcggagctgacggcggcggatgcctttgtggtcgatgtcgccctgaactacgccgacacggcgtatctggtggcagcgcacaaccgccacgcctctgcggccaataaggcgctgtttttacgcctgctgcacacggcaatcccgcaggttgaatttatcaaggactccccggcgctgatcgtcgcccgcgtcctcagcagcctgatcaacgagtcggtgatcatggtggaaagcggcgtctgcagccgggaagacatcaatgtcgccgccgtcgccggcgttaactacgccgacggcattttcggcttgctcgatagcctgggggagaaaaacgtcaggacgacgctgagcaacctggcgcagctgctgcacgcggcacgctatgcgccgcattacacccttctacacgccgcgcaaccggtgctgacgaccacgccttaa

SEQ ID NO: 143 - DNA, 1530 bp, Serratia marcescens 790
atggcagaaagtaatgcggcaattcaatcggctgcgattatcggcgcgggaacgatgggcagaggcatcgcttatcttttcgcgcaaaaaggcattcgcacggtgctttataatcgcaacggcaataccctcaatcaggctcgcgaatatatcgcgcaagacctgaacaagaaagtcgaacagggcaagatcgcgctgcgggataaaggtgcagtgctagccaatctggtgttcacctcggtgtttgagactatcgccgacagcgagctggtgatagaaaccatcgccgagcaagagcaaaccaaacttgaggtgctggcggccatcgccgcggcggtcaagcccgacacgctgatcgccaccaatacctcctcactgtcgcttaacaagctggcaaccgcggtgacgcacagcgagcggtttatcggtttgcactttttcaatcccgcgccgctgatgaaactgattgaaatcatcccggcctactttaccgcacgcgccaccaccgaacgttgccgtcagctggtagccgcgttggggaaacgcgatgtcgtctgccaggccacgccggggtttatcgtcaaccgcatggcccgcccctactacctggaagggttccgcctgttggaagaacacgtggcgcgcgcgccgcagatcgaccgcgccctcaaggccggcgggcactttcgcatggggccgctcgagctgaccgattttatcggccaggacatcaactatcaggtcagccggcaaatctggcaggacatgcaatacgatccgcgctatacccccggccatctgcagcgttcgctggtcgatgccggtctgttggggaaaaagaacggccgctcctattttgccgccgaagaaaacgccttaccggtaacggccgccaccgatgcagacgtcgagacgctgcgcgtttacggcgaacaccctttttttaccctgttgcaacagcgggccgcgcttcagtggccacggctgcgcgtggagcaacggccggccttaccgggcctggggccggccgtccagaccaatgaggctttcaccgtcagcgtcaccgatggccgcacggcgaaccagttggcggagctgacggcggcggatgcctttgtggtcgatgtcgccctgaactacgccgacacggcgtatctggtggcagcgcacaaccgccacgcctctgcggccaataaggcgctgtttttacgcctgctgcacacggcaatcccgcaggttgaatttatcaaggactccccggcgctgatcgtcgcccgcgtcctcagcagcctgatcaacgagtcggtgatcatggtggaaagcggcgtctgcagccgggaagacatcgatgtcgccgccgtcgctggcgttaactacgccgacggcattttcggctggctcgatagcctgggggagaaaaacgtcaggacgacgctgagcaacatggcgcagctgctgcacgcggcacgctatgcgccgcattacacccttctgcacgccgcgcaaccggcgctgatgaccacgccttaa

SEQ ID NO: 144 - DNA, 1530 bp, Serratia marcescens UMH5
atggcagaaagtaatgcggcaattcagtcggctgcgattatcggcgcgggaacgatgggcagaggcatcgcttatcttttcgcgcaaaaaggcattcgcacggtgctttataatcgcaacggcaataccctcagtcaggctcgcgactatatcgagctagacctgaacaagaaagtcgaacagggcaagatcgcgctgcaggataaaggcgcggtgttggccaatctggtgttcacctcggtatttgagaccattgccgacagcgagctggtgatagaaaccatcgccgagcaagagcaaaccaaacttgaggtgctggcgaccatcgccgctgcagtcaagcccgacacgctgatcgccaccaatacctcctcactgtcgctaaataagctggcaaccgcggtgacgcacagcgagcggtttatcggtttgcactttttcaaccccgcgccgctgatgaaactgattgaaatcatcccggcctactgtaccgcacacgccaccacggagcgttgccgccagctggtggccgcgttggggaaacgtgacgtcgtctgccaggccacgccggggtttatcgtcaaccgcatggcccgcccctactacctggaagggttccgcctattggaagaacacgtggcgcgcgcgccgcagatcgaccgtgccctcaaggccggtgggcactttcgtatggggccactcgaactgaccgattttatcggccaggacatcaactatcaggtcagtcggcaaatctggcaggacatgcaatacgacgcgcgctatacccccggccacctgcagcgttcgctggtcgatgccggtctattgggaaaaaagaacggccgctcctattttgccgtcgaagaaaacgccccgccggtgatggccgccaccgatgcagacattgagacgctgcacgtttacggcgaacaccctttttttaccctgttacaacagcgggccgcgcttcagtggccacggctgcgcgtggaacaacggcaggcattaccgggcctggggccggccgtccggatcaatgacgctttcaccatcagcatcaccgatggccgcacggcaaaccagctggccgagcagacggcggcggatgcctttgtggtcgatgttgccctgaattacgccgacacggcgtatctggtggcagcgcacagccgccacgcctctggggccaataaagcgctgttcttacgcctgctgcacacggcaatcccgcaggttgaatttatcaaggattccccggccttgatcgtcgcccgcgtcctcagcagcctaatcaacgagtcggtgatcatggtggaaagcggcgtctgcagccgggaagacatcgatgtcgccgccgtcgccggcgttaactacgccgacggcattttcggctggctcgatagcctgggggagaaaaacgtcaggacgacgctgagcaacctggcgcagttgctgcacgcggcgcgctatgcgccgcattacacccttctgcacgccgcgcaaccggcgctgacgaccacgccttaa

SEQ ID NO: 145 - DNA, 1530 bp, Serratia marcescens 2880STDY5682988
atggcagaaagtaatgcggcaattcagtcggctgcgattatcggcgcgggaacgatgggcagaggcatcgcttatcttttcgcgcaaaaaggcattcgcacggtgctttataatcgcaacggcaataccctcagtcaggctcgcgactatatcgagctagacctgaacaagaaagtcgaacagggcaagatcgcgctgcaggataaaggcgcggtgttggccaatctggtgttcacctcggtatttgagaccattgccgacagcgagctggtgatagaaaccatcgccgagcaagagcaaaccaaacttgaggtgctggcgaccatcgccgctgcagtcaagcccgacacgctgatcgccaccaatacctcctcactgtcgctaaataagctggcaaccgcggtgacgcacagcgagcggtttatcggtttgcactttttcaaccccgcgccgctgatgaaactgattgaaatcatcccggcctactgtaccgcacacgccaccacggagcgttgccgccagctggtggccgcgttggggaaacgtgacgtcgtctgccaggccacgccggggtttatcgtcaaccgcatggcccgcccctactacctggaagggttccgcctattggaagaacacgtggcgcgcgcgccgcagatcgaccgtgccctcaaggccggtgggcactttcgtatggggccactcgaactgaccgattttatcggccaggacatcaactatcaggtcagtcggcaaatctggcaggacatgcaatacgacgcgcgctatacccccggccacctgcagcgttcgctggtcgatgccggtctattgggaaaaaagaacggccgctcctattttgccgtcgaagaaaacgccccgccggtgatggccgccaccgatgcagacattgagacgctgcacgtttacggcgaacaccctttttttaccctgttacaacagcgggccgcgcttcagtggccacggctgcgcgtggaacaacggcaggcattaccgggcctggggccggccgtccggatcaatgacgctttcaccatcagcatcaccgatggccgcacggcaaaccagctggccgagcagacggcgacggatgcctttgtggtcgatgttgccctgaattacgccgacacggcgtatctggtggcagcgcacagccgccacgcctctggggccaataaagcgctgttcttacgcctgctgcacacggcaatcccgcaggttgaatttatcaaggattccccggccttgatcgtcgcccgcgtcctcagcagcctaatcaacgagtcggtgatcatggtggaaagcggcgtctgcagccgggaagacatcgatgtcgccgccgtcgccggcgttaactacgccgacggcattttcggctggctcgatagcctgggggagaaaaacgtcaggacgacgctgagcaacctggcgcagttgctgcacgcggcgcgctatgcgccgcattacacccttctgcacgccgcgcaaccggcgctgacgaccacgccttaa

SEQ ID NO: 146 - DNA, 1530 bp, Serratia marcescens 945154301
atggcagaaagtaatgcggcaattcagtcggctgcgattatcggcgcgggaacgatgggcagaggcatcgcttatcttttcgcgcaaaaaggcattcgcacggtgctttataatcgcaacggcaataccctcaatcaggctcgcgactatatcgagctagacctgaacaagaaagtcgaacagggcaagatcgcgctgcaggataaaggcgcggtgttggccaatctggtgttcacctcggtatttgagaccattgccgacagcgagctggtgatagaaaccatcgccgagcaagagcaaaccaaacttgaggtgctggcggccatagccgcggcagtcaagcccgacacgctgatcgccaccaatacctcctcactgtcgctgaataagctggcaaccgcggtgacgcacagcgagcggtttatcggtttgcacttttttaaccccgcgccgctgatgaaactgattgaaatcatcccggcctactttaccgcacacgccaccacggagcgttgccgtcaactggtggccgcgttggggaaacgcgatgttgtctgccaggccacgccggggtttatcgtcaaccgcatggcccgcccctactacctggaagggttccgcctattggaagaacacgtggcgcgcgcgccgcagatcgaccgtgccctcaaggctggcgggcactttcgtatggggccgctcgagctgaccgattttatcggccaggacatcaactatcaggtcagtcggcaaatctggcaggacatgcaatacgacgcgcgctatacccccggccacctgcagcgttcgctggtcgatgccggtctattgggaaaaaagaacggccgctcctattttgccgccgaagaaaacgccccgccggtgatggccgccaccgatgcagacattgagacgctgcacgtttacggcgaacaccctttttttaccctgttacaacaacgtgccgcgcttcagtggccacagctgcgcgtggaacaacggccggcattaccgggcctggggccggccgtccggatcaatgacgctttcagcgtcagcatcaccgatggccgcacggcaaaccagctggccgagcagacggcggcggatgcctttgtggtcgatgtcgccctgaattacgccgacacggcgtatctggtggcagcgcacagccgccatgcctctgcagccaataaagcgctgttcttacgcctgctgcacacggcaatcccgcaggttgaatttatcaaggattccccggcgctgatcgtcgcccgcgtcctcagcagcctaatcaacgagtcggtgatcatggtggaaagcggcgtctgcagccgggaagacatcgatgtcgccgccgtcgccggcgttaactacgccgacggcattttcggctggctagatagcctgggggagaaaaacgtcaggacgacgctgagcaacctggcgcagctgctgcacgcagcacgctatgcgccgcattacacccttctgcacgccgcgcaaccggcgctgacgaccacgccttaa

SEQ ID NO: 147 - DNA, 1530 bp, Serratia marcescens at10508
atggcagaaagtaatgcggcaattcagtcggctgcgattatcggcgcgggaacgatgggcagaggcatcgcttatcttttcgcgcaaaaaggcattcgcacggtgctttataatcgcaacggcaataccctcaatcaggctcgcgactatatcgagctagacctgaacaagaaagtcgaacagggcaagatcgcgctgcaggataaaggcgcggtgttggccaatctggtgttcacctcggtatttgagaccattgccgacagcgagctggtgatagaaaccatcgccgagcaagagcaaaccaaacttgaggtgctggcggccatcgccgcggcagtcaagcccgacacgctgatcgccaccaatacctcctcactgtcgctgaataagctggcaaccgcggtgacgcacagcgagcggtttatcggtttgcacttttttaaccccgcgccgctgatgaaactgattgaaatcatcccggcctactttaccgcacacgccaccacggagcgttgccgtcaactggtgaccgcgttggggaaacgcgatgttgtctgccaggccacgccggggtttatcgtcaaccgcatggcccgcccctactacctggaagggttccgcctattggaagaacacgtggcgcgcgcgccgcagatcgaccgtgccctcaaggccggcgggcactttcgtatggggccgctcgagctgaccgattttatcggccaggacatcaactatcaggtcagtcggcaaatctggcaggacatgcaatacgacgcgcgctatacccccggccacctgcagcgttcgctggtcgatgccggtctattgggaaaaaagaacggccgctcctattttgccgtcgaagaaaacgccccgccggtgatggccgccaccgatgcagacattgagacgctgcacgtttacggcgaacaccctttttttaccctgttacaacaacgtgccgcgcttcagtggccacagctgcgcgtggaacaacggccggcattaccgggcctggggccggccgtccggatcaatgacgctttcaccgtcagcatcaccgatggccgcacggcaaaccagctggccgagcagacggcggcggatgcctttgtggtcgatgtcgccctgaattacgccgacacggcgtatctggtggcagcgcacagccgccatgcctctgcagccaataaagcgctgttcttacgcctgctgcacacggcaatcccgcaggttgaatttatcaaggattccccggcgctgatcgtcgcccgcgtcctcagcagcctaatcaacgagtcggtgatcatggtggaaagcggcgtctgcagccgggaagacatcgatgtcgccgccgtcgccggcgttaactacgccgacggcattttcggctggctagatagcctgggggagaaaaacgtcaggacgacgctgagcaacctggcgcagctgctgcacgcagcacgctatgcgccgcattacacccttctgcacgccgcgcaaccggcgctgacgaccacgccttaa

SEQ ID NO: 148 - DNA, 1530 bp, Serratia marcescens ML2637
atggcagaaagtaatgcggcaattcagtcggctgcgattatcggcgcgggaacgatgggcagaggcatcgcttatcttttcgcgcaaaaaggcattcgcacggtgctttataatcgcaacggcaataccctcaatcaggctcgcgactatatcgagctagacctgaacaagaaagtcgaacagggcaagatcgcgctgcaggataaaggcgcggtgttggccaatctggtgttcacctcggtatttgagaccattgccgacagcgagctggtgatagaaaccatcgccgagcaagagcaaaccaaacttgaggtgctggcggccatcgccgcggcagtcaagcccgacacgctgatcgccaccaatacctcctcactgtcgctgaataagctggcaaccgcggtgacgcacagcgagcggtttatcggtttgcacttttttaaccccgcgccgctgatgaaactgattgaaatcatcccggcctactttaccgcacacgccaccacggagcgttgccgtcaactggtgaccgcgttggggaaacgcgatgttgtctgccaggccacgccggggtttatcgtcaaccgcatggcccgcccctactacctggaagggttccgcctattggaagaacacgtggcgcgcgcgccgcagatcgaccgtgccctcaaggccggcgggcactttcgtatggggccgctcgagctgaccgattttatcggccaggacatcaactatcaggtcagtcggcaaatctggcaggacatgcaatacgacgcgcgctatacccccggccacctacagcgttcgctggtcgatgccggtctattgggaaaaaagaacggccgctcctattttgccgtcgaagaaaacgccccgccggtgatggccgccaccgatgcagacattgagacgctgcacgtttacggcgaacaccctttttttaccctgttacaacaacgtgccgcgcttcagtggccacagctgcgcgtggaacaacggccggcattaccgggcctggggccggccgtccggatcaatgacgctttcaccgtcagcatcaccgatggccgcacggcaaaccagctggccgagcagacggcggcggatgcctttgtggtcgatgtcgccctgaattacgccgacacggcgtatctggtggcagcgcacagccgccacgcctctgcagccaataaagcgctgttcttacgcctgctgcacacggcaatcccgcaggttgaatttatcaaggattccccggcgctgatcgtcgcccgcgtcctcagcagcctaatcaacgagtcggtgatcatggtggaaagcggcgtctgcagccgggaagacatcgatgtcgccgccgtcgccggcgttaactacgccgacggcattttcggctggctagatagcctgggggagaaaaacgtcaggacgacgctgagcaacctggcgcagctgctgcacgcagcacgctatgcgccgcattacacccttctgcacgccgtgcaaccggcgctgacgaccacgccttaa

SEQ ID NO: 149 - DNA, 1530 bp, Serratia marcescens SM1978
atggcagaaagtaatgcggcaattcagtcggctgcgattatcggcgcgggaacgatgggcagaggcatcgcttatcttttcgcgcaaaaaggcattcgcacggtgctttataatcgcaacggcaataccctcaatcaggctcgcgactatatcgagctagacctgaacaagaaagtcgaacagggcaagatcgcgctgcaggataaaggcgcggtgttggccaatctggtgttcacctcggtatttgagaccattgccgacagcgagctggtgatagaaaccatcgccgagcaagagcaaaccaaacttgaggtgctggcggccatagccgcggcagtcaagcccgacacgctgatcgccaccaatacctcctcactgtcgctgaataagctggcaaccgcggtgacgcacagcgagcggtttatcggtttgcacttttttaaccccgcgccgctgatgaaactgattgaaatcatcccggcctactttaccgcacacgccaccacggagcgttgccgtcaactggtgaccgcgttggggaaacgcgatgttgtctgccaggccacgccggggtttatcgtcaaccgcatggcccgcccctactacctggaagggttccgcctattggaagaacacgtggcgcgcgcgccgcagatcgaccgtgccctcaaggccggcgggcactttcgtatggggccgctcgagctgaccgattttatcggccaggacatcaactatcaggtcagtcggcaaatctggcaggacatgcaatacgacgcgcgctatacccccggccacctgcagcgttcgctggtcgatgccggtctattgggaaaaaagaacggccgctcctattttgccgccgaagaaaacgccccgccggtgatggcctccaccgatgcagacattgagacgctgcacgtttacggcgaacaccctttttttaccctgttacaacaacgtgccgcgcttcagtggccacagctgcgcgtggaacaacggccggcattaccgggcctggggccggccgtccggatcaatgacgctttcagcgtcagcatcaccgatggccgcacggcaaaccagctggccgagcagacgacggcggatgcctttgtggtcgatgtcgccctgaattacgccgacacggcgtatctggtggcagcgcacagccgccacgcctctgcagccaataaagcgctgttcttacgcctgctgcacacggcaatcccgcaggttgaatttatcaaggattccccggcgctgatcgtcgcccgcgtcctcagcagcctaatcaacgagtcggtgatcatggtggaaagcggcgtctgcagccgggaagacatcgatgtcgccgccgtcgccggcgttaactacgccgacggcattttcggctggctagatagcctgggggagaaaaacgtcaggacgacgctgagcaacctggcgcagctgctgcacgcagcacgctatgcgccgcattacacccttctgcacgccgcgcaaccggcgctgacgaccacgccttaa

SEQ ID NO: 150 - DNA, 1530 bp, Serratia marcescens PWN146
atggcagaaagtaatgcggcaattcagtcggctgcgattatcggcgcgggaacgatgggcagaggcatcgcttatcttttcgcgcaaaaaggcattcgcacggtgctttataatcgcaacggcaataccctcaatcaggctcgcgactatatcgagctagacctgaacaagaaagtcgaacagggcaagatcgcgctacaggataaaggcgcggtgttggccaatctggtgttcacctcggtatttgagaccattgccgacagcgagctggtgatagaaaccatcgccgagcaagagcaaaccaaacttgaggtgctggcgaccatcgccgcggcagtcaagcccgacacgctgatcgccaccaatacctcctcactgtcgctaaataagctggcaaccgcggtgacgcacagcgagcggtttatcggtttgcacttttttaaccccgcgccgctgatgaaactgattgaaatcatcccggcctactttaccgcacacgccaccacggagcgttgccgtcaactggtggccgcgttgggaaaacgcgacgttgtctgccaggccacgccggggtttatcgtcaaccgcatggcccgcccctactacctggaagggttccgcctattggaagaacacgtggcgcgcgcgccgcagatcgaccgtgccctcaaggccggcgggcactttcgtatggggccgctcgaactgaccgattttatcggccaggacatcaactatcaggtcagccggcaaatctggcaggacatgcaatacgacgcgcgctatacccccggccacctgcagcgttcgctggtcgatgccggtctattgggaaaaaagaacggccgctcctattttgccgtcgaagaaaacgccccgccggtgatggccgccaccgatgcagacattgagacgctgcacgtctgcggcgaacaccctttttttactctgttgcaacagcgagccgcacttcagtggccacggctgcgcgtggaacaacggccggccttgccgggcctggggcccgccgtctggatcaatgacgctttcaccgtcagcatcaccgatggccgcacggcaaaccagctggccgagcagacggcggcggatgcctttgtggtcgatgtcgccctgaattacgccgacacggcgtatctggtggcagcacacagccgccacgcctctgcggccaataaagcgctgttcttacgcctgctgcacaccgcaatcccgcaggttgaatttatcaaggattccccggcgctgatcgtcgctcgcgtcctcagcagcctgatcaatgagtcggtgatcatggtggaaagcggcgtctgcagccgggaagacatcgatgtcgccgccgtcgccggcgttaactacgccgacggcattttcggctggctcgatagcctgggggagaaaaacgtcagggcgacgctgagcaacttggcgcagctgctgcacgcggcgcgctatgcgccgcattacacccttctgcacgccgcgcaaccggcgctgacgaccacgccttaa

SEQ ID NO: 151 - DNA, 1530 bp, Serratia marcescens H1q
atggcagaacgtaatgcggcaattcaatcggctgcgattatcggcgcgggaacgatgggcagaggcatcgcttatcttttcgcgcaaaaaggcattcgtacggtgctttataatcgcaacggcaataccctcattcaggctcgtgaatatatcgtgcaagacctggacaaaaaggtcgaacagggcaggctcgcgccgcaggataaagacgcggtgctggccaatctgcagttctcatcggtgtttgaagctatcgtcgacagcgatttggtgctcgaaactatcgccgagcaagagcaagccaaactcgaggtgctggccgccatcgctgcggcggtcaaacccgacacgctgatcgccaccaatacgtcctcattgtcgctcaataagctggcaacggcggtgacccacagcgaacgctttatcggtttgcactttttcaaccccgcaccgctaatgaagctgattgaaatcattccggcctactttaccgcccaagccaccactgaaacttgccgccaactggtggcggcattggggaaacgcgatgtcgtctgccaggctacgccggggttcatcgtcaaccgtatggcccgcccctactacctggaaggctttcgcctgttggaagagcacgtggcgcgcgcgccgcagatcgaccgcgccctcaaggccggcggacactttcgcatggggccgctcgagctgaccgattttatcggccaggacatcaactatcaggtcagccggcaaatttggcaggacatgcagtacgacccgcgctatacccccggccatctgcagcgttcgctggtcgatgccgggctgctggggaaaaagaacggtcgctcctatttttccgccgaagaaaccgccccgccggttgaggccgccgtcgaggcggatgtcgagacgctgcgcatttacggcgaacaccctttgtttaccctgctgcaacagcgagccgcactgcaatggccgcagttgcgcgtggaacagcggccggccttgtcgggcctgggagcggccattcaggtcaatgacgctttcaccgtcagcatcaccgatggccgcacggcaaatcagttggccgagcagacggcggcggacgcctttgtggtcgatgtcgccctgaactacgccgacacggcgtatctggtggcggcgcacagccgccacgcctctgcggctaataaggcgttgtttttgcgcctgctgcacaccgcgcttccgcaggttgaatttatcaaggactccccggcgctgatcgtcgcccgcgtcctcagcagcctgatcaacgagtcggtgatcatggtggaaagcggcgtctgcagccgggaagacatcgatgtcgccgccgtcgccggcgtgaactacgccgacggcattttcggctggctcactcgcctgggggagaaaaacgtcaggacgacgctgagcaacctggcgcagctgctgcacgcggcccgctatgcgccgcattacacccttctgcacgccgcccaaccggcgctgaccaccacgccttaa

SEQ ID NO: 152 - DNA, 1530 bp, Serratia marcescens UMH6
atggcagaaagtaatgcggcaattcaatcggctgcgattatcggcgcgggaacgatgggcagaggcatcgcttatctttttgcgcaaaaaagcattcgtacggtgctttataatcgcaacggcaataccctcaatcaagctcgcgacgctatcgtgcaagacctgaacaaaaaggtggaacagggcaagctcgcgctgcaggacaaagacgcggtgctggctaatctgacgttctccgcggaatttggggccatcgccgacagcgatctggtgatcgaaaccatcgcagagcatgagcaagccaaactcgaagtgctggcggccatcgccgcgacggtcaagcccgacacgctgatcgccaccaatacctcctcactgtcgcttaataagctggcgacagcggtgacgcacagcgaacgctttatcggtttgcactttttcaaccccgcgccgctgatgaagctgattgaaatcattccggcctattttaccgcacaggtcaccaccgaacgttgccgtcaactggtggcggcgttggggaaacgcgatgtcgtctgccaggccacgccgggatttatcgtcaaccgtatggcccgcccctactatctggaagggttccgcctgttggaagaacacgtggcgcgtgcgccgcagatcgaccgcgccctcaaagccggcggacactttcgcatggggccgctcgagctgaccgattttatcggtcaggacatcaactatcaggtcagccggcaaatttggcaggacatgcagtacgatccgcgctataccccgggccatctgcagcgctcgctggtcgatgccggtctgttgggcaaaaagaacggccgctcctatttctccgccgaagaatctcccccgccgcttgcggccgccgtcgatgcggaggtcgagacgctacgcatttacggtgaacatcctctctttaccctgctacagcagcgggccgccctgcaatggccgcggctgcgcgttgaacaacggccgacattaccgggcctgggcgccgccattcaggtcaatgacgctttcaccgtcagcgttaccgatggccgcacggcaaaccagcttgccgaacagaccgcggcggacgcctttgtcgtcgatgttgccctgaactacggcgatacggcgtacctggtggcggcacatagccgccacgcctctgcggccaataaggcgctgtttttacgcctgctgcacaccgcgatcccgcaggtggaatttatcaaggattccccggccctgatcgtcgcccgcgtgctcagcagcctgatcaacgagtcggtgatcatggtggaaagcggcgtctgcagccgggaagacattgatgtcgccgccgtcgccggcgtgaactacgccgacggtattttcggctggctcactcgcctcggggaggaaaatgtcaggacgacgctgagcaacctggcgcaattgctgcacgcggcgcgctatgcgccgcattacacccttctgcacgccgcccaaccggcgctgaccaccacgccttaa

SEQ ID NO: 153 - DNA, 1530 bp, Serratia nematodiphila WCU338
atggcagaaagtaatgcggcaattcaatcggctgcgattatcggcgcgggaacgatgggcagaggcatcgcttatcttttcgcgcaaaaaagcattcgtacggtgctttataatcgcaacggcaataccctcaatcaagctcgcgacgctatcgtgcaagacctgaacaaaaaggtggaacagggcaagctcgcgctgcaggataaagacgcggtgctggctaatctgacgttctccgcggaatttggggccatcgccgacagcgatctggtgatcgaaaccatcgcagaacatgagcaagccaaactcgaggtgctggcggccatcgccgcgacggtcaagcccgacacgctgatcgccaccaatacctcctcactgtcgctgaataagctggcgacggcggtgacgcacagcgaacgctttatcggtttgcactttttcaaccccgcgccgctgatgaagctgattgaaatcattccggcctattttaccgcacagatcaccaccgaacgttgccgtcaactggtggcggcattggggaaacgcgatgtcgtctgtcaggccacgccggggtttatcgtcaaccgtatggctcgcccctactatctggaaggattccgcctgttggaagaacacgtggcgcgtgcgccgcagatcgaccgcgccctcaaagccggcggacactttcgcatggggccgctcgagctgaccgattttatcggtcaggacatcaactatcaggtcagccggcaaatttggcaggacatgcagtacgatccgcgctataccccgggccatctgcagcgctcgctggtcgatgccggtttgctggggaaaaagaacggccgctcctatttttccgccgaagaatctcccccgccgcttgcagccgccgtcgatgcggaggtcgagacgctacgcatttacggtgaacatcctctctttaccctgctacagcagcgggccgccctgcaatggccgcggctgcgcgtggaacagcggccgacattaccaggcctgggcgccgccattcaggtcaatgacgctttcaccgtcagcgttaccgatggccgcacggcaaaccagcttgccgaacagaccgcggcggacgcctttgtcgtcgatgtcgccctgaactacggcgatacggcgtacctggtggcggcgcatagccgccacgcatctgcggccaataaggcgctgtttttacgcctgctgcacaccgcgatcccgcaggtggaatttatcaaggattccccggccttgatcgtcgcccgcgtgctcagcagcctgatcaacgagtcggtgatcatggtggaaagcggcgtctgcagccgggaagacattgatgtcgccgccgtcgccggcgtgaactacgccgacggtattttcggctggctcactcgcctcggggaggaaaatgtcaggacgacgctgagcaacctggcgcaattgctgcacgcggcgcgctatgcgccgcattacacccttctgcacgccgcccaaccggcgctgaccaccacgccttaa

SEQ ID NO: 154 - DNA, 1530 bp, Serratia sp. OLEL1
atggcagaaagtaatgcggcaattcaatcggctgcgattatcggcgcgggaacgatgggcagaggcatcgcttatcttttggcgcaaaaaagcattcgtacggtgctttataatcgcaacggcaataccctcaatcaagctcgcgacgctatcgtgcaagacctgaacaaaaaggtggaacagggcaagctcgcgctgcaggacaaagacgcggtgctggctaatctgacgttctccgcggaatttggggccatcgccgacagcgatctggtgatcgaaaccatcgcagagcatgagcaagccaaactcgaagtgctggcggccatcgccgcgacggtcaagcccgacacgctgatcgccaccaatacctcctcactgtcgcttaataagctggcgacggcggtgacgcacagcgaacgctttatcggtttgcactttttcaaccccgcgccgctgatgaagctgattgaaatcattccggcctattttaccgcacaggtcaccaccgaacgttgccgtcaactggtggcggcgttggggaaacgcgatgtcgtctgccaggccacgccgggatttatcgtcaaccgtatggcccgcccctactatctggaagggttccgcctgttggaagaacacgtggcgcgtgcgccgcagatcgaccgcgccctcaaagccggcggacactttcgcatggggccgctcgagctgaccgattttatcggtcaggacatcaactatcaggtcagccggcaaatttggcaggacatgcagtacgatccgcgctataccccgggccatctgcagcgctcgctggtcgatgccggtctgttgggcaaaaagaacggccgctcctatttctccgccgaagaatctcccccgccgcttgcggccgccgtcgatgcggaggtcgagacgctacgcatttacggtgaacatcctctctttaccctgctacagcagcgggccgccctgcaatggccgcggctgcgcgtggaacaacggccgacattaccgggcctgggcgccgccattcaggttaatgacgctttcaccgtcagcgttaccgatggccgcacggcaaaccagcttgccgaacagactgcggcggacgcctttgtcgtcgatgtcgccctgaactacggcgatacggcgtacctggtggcggcgcatagccgccacgcctctgcggccaataaggcgctgtttttacgcctgctgcacaccgcgatcccgcaggtggaatttatcaaggattccccggccttgatcgtcgcccgcgtgctcagcagcctgatcaacgagtcggtgatcatggtggaaagcggcgtctgcagccgggaagacattgatgtcgccgccgtcgccggcgtgaactacgccgacggcattttcggctggctcactcgcctcggggaggaaaatgtcaggacgacgctgagcaacctggcgcaattgctgcacgcggcgcgctatgcgccgcattacacccttctgcacgccgcccaaccggcgctgaccaccacgccttaa

SEQ ID NO: 155 - DNA, 1530 bp, Serratia marcescens 7209
atggcagaaagtaatgcggcaattcaatcggctgcgattatcggcgcgggaacgatgggcagaggcatcgcttatctttttgcgcaaaaaagcattcgtacggtgctttataatcgcaacggcaataccctcaatcaagctcgcgacgctatcgtgcaagacctgaacaaaaaggtggaacagggcaagctcgcgctgcaggacaaagacgcggtgctggctaatctgacgttctccgcagaatttggggtcatcgccgacagcgatctggtgatcgaaaccatcgcagaacatgagcaagccaaactcgaggtgctggcggccatcgccgcgacggtcaagcccgacacgctgatcgccaccaatacctcctcactgtcgcttaataagctggcgacggcggtgacgcacagcgaacgctttatcggtttgcactttttcaaccccgcgccgctgatgaagctgattgaaatcattccggcctattttaccgcacaggtcaccaccgaacgttgccgtcaactggtggcggcgttagggaaacgcgatgtcgtctgtcaggccacgccgggatttatcgtcaaccgtatggcccgcccctactatctggaagggttccgcctgttggaagaacacgtggcgcgtgcgccgcagatcgaccgcgccctcaaagccggcggacactttcgcatggggccgctcgagctgaccgattttatcggtcaggacatcaactatcaggtcagccggcaaatttggcaggacatgcagtacgatccgcgctataccccgggccatctgcagcgctcgctggtcgatgccggtctgttgggcaaaaagaacggccgctcctatttttccgccgaagaatctcccccgccgcttgcggccgccgtcgatgcggaagtcgagacgctacgcatttacggtgaacatcctctctttaccctgctacagcagcgggccgccctgcaatggccgcggctgcgcgtggaacaacggccgacattaccgggcctgggcgccgccattcaggtcaatgacgctttcaccgtcagcgttaccgatggccgcacggcaaaccagcttgccgaacagaccgcggcggacgcctttgtcgtcgatgtcgccctgaactacggcgatacggcgtacctggtggcggcacatagccgccatgcctctgcggccaataaggcgctgtttttacgcctgctgcacaccgcgatcccgcaggtggaatttatcaaggattccccggccttgatcgtcgcccgcgtgctcagcagcctgatcaacgagtcggttatcatggtggaaagcggcgtctgcagccgggaagacattgatgtcgccgccgtcgccggcgtgaactacgccgacggtattttcggctggctcactcgcctcggggaggaaaatgtcaggacgacgctgagcaacctggcgcaattgctgcacgcggcgcgctatgcgccgcattacacccttctgcacgccgcccaaccggcgctgaccaccacgccttaa

SEQ ID NO: 156 - DNA, 1530 bp, Serratia marcescens sicaria (Ss1)
atggcagaaagtaatgcggcaattcaatcggctgcgattatcggcgcgggaacgatgggcagaggcatcgcttatctttttgcgcaaaaaagcattcgtacggtgctttataatcgcaacggcaataccctcaatcaagctcgcgacgctatcgtgcaagacctgaacaaaaaggtggaacagggcaagctcgcgctgcaggacaaagacgcggtgctggctaatctgacgttctccgcggaatttggggccatcgccgacagcgatctggtgatcgaaaccatcgcagagcatgagcaagccaaactcgaggtgctggcggccatcgccgcgacggtcaagcccgacacgctgatcgccaccaatacctcctcactgtcgcttaataagctggcgacggcggtgacgcacagcgaacgctttatcggtttgcactttttcaaccccgcgccgctgatgaagctgattgaaatcattccggcctattttaccgcacaggtcaccaccgaacgttgccgtcaactggtggcggcgttggggaaacgcgatgtcgtctgccaggccacgccgggatttatcgtcaaccgtatggcccgcccctactatctggaagggttccgcctgttggaagaacacgtggcgcgtgcgccgcagatcgaccgcgccctcaaagccggcggacactttcgcatggggccgctcgagctgaccgattttatcggtcaggacatcaactatcaggtcagccggcaaatttggcaggacatgcagtacgatccgcgctataccccgggccatctgcagcgctcgctggtcgatgccggtctgttgggcaaaaagaacggccgctcctatttttccaccgaagaatctcccccgccgcttgcggccgccgtcgatgcggaggtcgagacgctacgcatttacggtgaacatcctctctttaccctgctacagcagcgggccgccctgcaatggccgcggctgcgcgtggaacaacggccgacattaccgggcttgggcgccgccattcaggtcaatgacgctttcaccgtcagcgttaccgatggccgcacggcaaaccagcttgccgaacagaccgcggcggacgcctttgtcgtcgatgtcgccctgaactacggcgatacggcctacctggtggcggcgcatagccgccacgcctctgcggccaataaggcgctgtttttacgcctgctgcacaccgcgatcccgcaggtggaatttatcaaggattccccggccttgatcgtcgcccgcgtgctcagcagcctgattaacgagtcggtgatcatggtggaaagcggcgtctgtagccgggaagacattgatgtcgccgccgtcgccggcgtgaactacgccgacggtattttcggctggctcactcgcctcggggaggaaaatgtcaggacgacgctgagcaacctggcgcaattgctgcacgcggcgcgctatgcgccgcattacacccttctgcacgccgcccaaccggcgctgaccaccacgccttaa

SEQ ID NO: 157 - DNA, 1530 bp, Serratia sp. OLFL2
atggcagaaagtaatgcggcaattcaatcggctgcgattatcggcgcgggaacgatgggcagaggcatcgcttatcttttggcgcaaaaaagcattcgtacggtgctttataatcgcaacggcaataccctcaatcaagctcgcgacgctatcgtgcaagacctgaacaaaaaggtggaacagggcaagctcgcgctgcaggacaaagacgcggtgctggctaatctgacgttctccgcggaatttggggccatcgccgacagcgatctggtgatcgaaaccatcgcagagcatgagcaagccaaactcgacgtgctggcggccatcgccgcgacggtcaagcccgacacgctgatcgccaccaatacctcctcactgtcgcttaataagctggcgacggcggtgacgcacagcgaacgctttatcggtttgcactttttcaaccccgcgccgctgatgaagctgattgaaatcattccggcctattttaccgcacaggtcaccaccgaacgttgccgtcaactggtggcggcgttggggaaacgcgatgtcgtctgccaggccacgccgggatttatcgtcaaccgtatggcccgcccctactatctggaagggttccgcctgttggaagaacacgtggcgcgtgcgccgcagatcgaccgcgccctcaaagccggcggacactttcgcatggggccgctcgagctgaccgattttatcggtcaggacatcaactatcaggtcagccggcaaatttggcaggacatgcagtacgatccgcgctataccccgggccatctgcagcgctcgctggtcgatgccggtctgttgggcaaaaagaacggccgctcctatttctccgccgaagaatctcccccgccgcttgcggccgccgtcgatgcggaggtcgagacgctacgcatttacggtgaacatcctctctttaccctgctacagcagcgggccgccctgcaatggccgcggctgcgcgtggaacaacggccgacattaccgggcctgggcgccgccattcaggttaatgacgctttcaccgtcagcgttaccgatggccgcacggcaaaccagcttgccgaacagactgcggcggacgcctttgtcgtcgatgtcgccctgaactacggcgatacggcgtacctggtggcggcgcatagccgccacgcctctgcggccaataaggcgctgtttttacgcctgctgcacaccgcgatcccgcaggtggaatttatcaaggattccccggccttgatcgtcgcccgcgtgctcagcagcctgatcaacgagtcggtgatcatggtggaaagcggcgtctgcagccgggaagacattgatgtcgccgccgtcgccggcgtgaactacgccgacggcattttcggctggctcactcgcctcggggaggaaaatgtcaggacgacgctgagcaacctggcgcaattgctgcacgcggcgcgctatgcgccgcattacacccttctgcacgccgcccaaccggcgctgaccaccacgccttaa

SEQ ID NO: 158 - DNA, 1530 bp, Serratia marcescens BIDMC 81
atggcagaaagtaatgcggcaattcaatcggctgcgattatcggcgcgggaacgatgggcagaggcatcgcttatcttttggcgcaaaaaagcattcgtacggtgctttataatcgcaacggcaataccctcaatcaagctcgcgacgctatcgtgcaagacctgaacaaaaaggtggaacagggcaagctcgcgctgcaggacaaagacgcggtgctggctaatctgacgttctccgcggaatttggagccatcgccgacagcgatctggtgatcgaaaccatcgcagagcatgagcaagccaaactcgaggtgctggcggccatcgccgcgacggtcaagcccgacacgctgatcgccaccaatacctcctcactgtcgcttaataagctggcgacggcggtaacgcacagcgaacgctttatcggtttgcactttttcaaccccgcgccgctgatgaagctgattgaaatcattccggcctattttaccgcacaggtcaccaccgaacgttgccgtcaactggtggcggcgttggggaaacgcgatgtcgtctgccaggccacgccgggatttatcgtcaaccgtatggcccgcccctactatctggaagggttccgcctgttggaagaacacgtggcgcgtgcgccgcagatcgaccgagccctcaaagccggcggacactttcgcatggggccgctcgagctgaccgattttatcggtcaggacatcaactatcaggtcagccggcaaatttggcaggacatgcagtacgatccgcgctataccccgggccatctgcagcgctcgctggtcgatgccggtctgttgggcaaaaagaacggccgctcctatttttccgccgaagaatctcccccgccgcttgcggccgccgtcgatgcggaggtcgagacgctacgcatttacggtgaacatcctctctttaccctgctacagcagcgggccgccctgcaatggccgcggctgcgcgtggaacaacggccgacattaccggacctgggcgccgccattcaggtcaatgacgctttcaccgtcagcgttaccgatggccgcacggcaaaccagcttgccgaacagaccgcggcggacgcctttgtcgtcgatgtcgccctgaactacggcgatacggcgtacctggtggcggcgcatagccgccacgcctctgcggccaataaggcgctgtttttacgcctgctgcacaccgcgatcccgcaggtggaatttatcaaggattccccggccttgatcgtcgcccgcgtgctcagcagcctgatcaacgagtcggtgatcatggtggaaagcggcgtctgcagccgggaagacattgatgtcgccgccgtcgccggcgtgaactacgccgacggtattttcggctggctcactcgcctcggggaggaaaatgtcaggacgacgctgagcaacctggcgcaattgctgcacgcggcgcgctatgcgccgcattacacccttctgcacgccgcccaaccggcgctgaccaccacgccttaa

SEQ ID NO: 159 - DNA, 1530 bp, Serratia marcescens BIDMC 50
atggcagaaagtaatgcggcaattcaatcggctgcgattatcggcgcgggaacgatgggcagaggcatcgcttatctttttgcgcaaaaaagcattcgtacggtgctttataatcgcaacggcaataccctcaatcaagctcgcgacgctatcgtgcaagacctgaacaaaaaggtggaacagggcaagctcgcgctgcaggacaaagacgtggtgctggctaatctgacgttctccgcggaatttggggccatcgccgacagcgatctggtgatcgaaaccatcgcagagcatgagcaagccaaactcgaggtgctggcggccatcgccgcgacggtcaagcccgacacgctgatcgccaccaatacctcctcactgtcgcttaataagctggcgacggcggtgacgcacagcgaacgctttatcggtttgcactttttcaaccccgcgccgctgatgaagctgattgaaatcattccggcctattttaccgcacaggtcaccaccgaacgttgccgtcaactggtggcggcgttagggaaacgcgatgtcgtctgtcaggccacgccgggatttatcgtcaaccgtatggcccgcccctactatctggaagggttccgcctgttggaagaacacgtggcgcgtgcgccgcagatcgaccgcgccctcaaagccggcggacactttcgcatggggccgctcgagctgaccgattttatcggtcaggacatcaactatcaggtcagccggcaaatttggcaggacatgcagtacgatccgcgctataccccgggccatctgcagcgctcgctggtcgatgccggtctgttgggcaaaaagaacggccgctcctatttttccgccgaagaatctcccccgccgcttgcggccgccgtcgatgcggaggtcgagacgctacgcatttacggtgaacatcctctctttaccctgctacagcagcgggccgccctgcaatggccgcggctgcgcgtggaacaacggccgacattaccggacctgggcgccgccattcaggtcaatgacgctttcaccgtcagcgttaccgatggccgcacggcaaaccagcttgccgaacagaccgcggcggacgcctttgtcgtcgatgtcgccctgaactacggcgatacggcgtacctggtggcggcacatagccgccatgcctctgcggccaataaggcgctgtttttacgcctgctgcacaccgcgatcccgcaggtggaatttatcaaggattccccggccttgatcgtcgcccgcgtgctcagcagcctgatcaacgagtcggtgatcatggtggaaagcggcgtctgcagccgggaagacattgatgtcgccgccgtcgccggcgtgaactacgccgacggtattttcggctggctcactcgcctcggggaggaaaatgtcaggacgacgctgagcaacctggcgcaattgctgcacgcggcgcgctatgcgccgcattacacccttctgcacgccgcccaaccggcgctgaccaccacgccttaa

SEQ ID NO: 160 - DNA, 1530 bp, Serratia marcescens UMH7
atggcagaaagtaatgcggcaattcaatcggctgcgattatcggcgcgggaacgatgggcagaggcatcgcttatcttttggcgcaaaaaagcattcgtacggtgctttataatcgcaacggcaataccctcaatcaagctcgcgacgctatcgtgcaagacctgaacaaaaaggtggaacagggcaagctcgcgctgcaggacaaagacacggtgctggctaatctgacgttctccgcggaatttggggccatcgccgacagcgatctggtgatcgaaaccatcgcagagcatgagcaagccaaactcgaggtgctggcggccatcgccgcgacggtcaagcccgacacgctgatcgccaccaatacctcctcactgtcgcttaataagctggcgacggcggtgacgcacagcgaacgctttatcggtttgcactttttcaaccccgcgccgctgatgaagctgattgaaatcattccggcctattttaccgcacaggtcaccaccgaacgttgccgtcaactggtggcggcgttggggaaacgcgatgtcgtctgtcaggccacgccgggatttatcgtcaaccgtatggcccgcccctactatctggaagggttccgcctgttggaagaacacgtggcgcgtgcgccgcagatcgaccgcgccctcaaagccggcggacactttcgcatggggccgctcgaactgaccgattttatcggtcaggacatcaactatcaggtcagccggcaaatttggcaggacatgcagtacgatccgcgctataccccgggccatctgcagcgctcgctggtcgatgccggtctgttgggcaaaaagaacggccgctcctatttttccgccgaagaatctcctccgccgcttgcggccgccgtcgatgcggaggtcgagacgctacgcatttacggtgaacatcctctctttactctgctacagcagcgggccaccctgcaatggccgcggctgcgcgtggaacaacggccgacattaccgggcctgggcgccgccattcaggttaatgacgctttcaccgtcagcgttaccgatggccgcacggcaaaccagcttgccgaacagaccgcggcggacgcctttgtcgtcgatgtcgccctgaactacggcgatacggcgtacctggtggcggcgcatagccgccacgcctctgcagccaataaggcgctgtttttacgcctgctgcacaccgcgatcccgcaggtggaatttatcaaggattccccggccttgatcgtcgcccgcgtgctcagcagcctgatcaacgagtcggtgatcatggtggaaagcggcgtctgcagccgggaagacattgatgtcgccgccgtcgccggcgtgaactacgccgacggtattttcggctggctcactcgcctcggggaggaaaatgtcaggacgacgctgagcaacctggcgcaattgctgcacgcggcgcgctatgcgccgcattacacccttctgcacgccgcccaaccggcgctgaccaccacgccttaa

SEQ ID NO: 161 - DNA, 1530 bp, Serratia marcescens RSC-14
atggcagaaagtaatgcggcaattcaatcggctgcgattatcggcgcgggaacgatgggcagaggcatcgcttatcttttggcgcaaaaaagcattcgtacggtgctttataatcgcaacggcaataccctcaatcaagctcgcgacgctatcgtgcaagacctgaacaaaaaggtggaacagggcaagctcgcgctgcaggacaaagacgcggtgctggctaatctgacgttctccacggaatttggggccatcgccgacagcgatctggtgatcgaaaccatcgcagagcatgagcaagccaaactcgaagtgctggcggccatcgccgcgacggtcaagcccgacaggctgatcgccaccaatacctcctcactgtcgcttaataagctggcgacggcggtgacgcacagcgaacgctttatcggtttgcactttttcaaccccgcgccgctgatgaagctgattgaaatcattccggcctattttaccgcacaggtcaccaccgaacgttgccgtcaactggtggcggcgttagggaaacgcgatgtcgtctgtcaggccacgccgggatttatcgtcaaccgtatggcccgcccctactatctggaagggttccgcctgttggaagaacacgtggcgcgtgcgccgcagatcgaccgcgccctcaaagccggcggacactttcgcatggggccgctcgagctgaccgattttatcggtcaggacatcaactatcaggtcagccggcaaatttggcaggacatgcagtacgatccgcgctataccccgggccatctgcagcgctcgctggtcgatgccggtctgttgggcaaaaagaacggccgctcctatttttccgccgaagaatctcccccgccgcttgcggccgccgtcgatgcggaagtcgagacgctacgcatttacggtgaacatcctctctttaccctgctacagcagcgggccgccctgcaatggccgcggctgcgcgtggaacaacagccgacattaccgggcctgggcgccgccattcaggtcaatgacgctttcaccgtcagcgttaccgatggccgcacggcaaaccagcttgccgaacagaccgcggcggacgcctttgtcgtcgatgtcgccctgaactacggcgatacggcgtacctggtggcggcacatagccgccatgcctctgcggccaataaggcgctgtttttacgcctgctgcacaccgcgatcccgcaggtggaatttatcaaggattccccggccttgatcgtcgcccgcgtgctcagcagcctgatcaacgagtcggtgatcatggtggaaagcggcgtctgcagccgggaagacattgatgtcgccgccgtcgccggcgtgaactacgccgacggtattttcggctggctcactcgcctcggggaggaaaatgtcaggacgacgctgagcaacctggcgcaattgctgcacgcggcgcgctatgcgccgcattacacccttctgcacgccgcccaaccggcgctgaccaccacgccttaa

SEQ ID NO: 162 - DNA, 1530 bp, Serratia marcescens SM03
atggcagaacgtaatgcggcaattcaatcggctgcgattatcggcgcgggaacgatgggcagaggcatcgcttatcttttcgcgcaaaaaggcattcgtacggtgctttataatcgcaacggcaataccctcattcaggctcgtgaatatatcgtgcaagacctggacaaaaaggtcgaacagggcaggctcgcgccgcaggataaagacgcggtgctggccaatctgcagttctcatcggtgtttgaagctatcgtcgacagcgatttggtgctcgaaactatcgccgagcaagagcaagccaaactcgaggtgctggccgccatcgctgcggcggtcaaacccgacacgctgatcgccaccaatacgtcctcattgtcgctcaataagctggcaacggcggtgacccacagcgaacgctttatcggtttgcactttttcaaccccgcaccgctaatgaagctgattgaaatcattccggcctactttaccgcccaagccaccactgaaacttgccgccaactggtggcggcattggggaaacgcgatgtcgtctgccaggctacgccggggttcatcgtcaaccgtatggcccgcccctactacctggaaggctttcgcctgttggaagagcacgtggcgcgcgcgccgcagatcgaccgcgccctcaaggccggcggacactttcgcatggggccgctcgagctgaccgattttatcggccaggacatcaactatcaggtcagccggcaaatttggcaggacatgcagtacgacccgcgctatacccccggccatctgcagcgttcgctggtcgatgccgggctgctggggaaaaagaacggtcgctcctatttttccgccgaagaaaccgccccgccggttgaggccgccgccgaggcggatgtcgagacgctgcgcatttacggcgaacaccctttgtttaccctgctgcaacagcgagccgcactgcaatggccgcagttgcgcgtggaacagcggccggccttgtcgggcctgggagcggccattcaggtcaatgacgctttcaccgtcagcgtcaccgatggccgcacggcaaatcagttggccgagcagacggcggcggacgcctttgtggtcgatgtcgccctgaactacgccgacacggcgtatctggtggcggcgcacagccgccacgcctctgcggctaataaggcgttgtttttgcgcctgctgcacaccgcgcttccgcaggttgaatttatcaaggactccccggcgctgatcgtcgcccgcgtcctcagcagcctgatcaacgagtcggtgatcatggtggaaagcggcgtctgcagccgggaagacatcgatgtcgccgccgtcgccggcgtgaactacgccgacggcattttcggctggctcactcgcctgggggagaaaaacgtcaggacgacgctgagcaacctggcgcagctgctgcacgcggcccgctatgcgccgcattacacccttctgcacgccgcccaaccggcgctgaccaccacgccttaa

SEQ ID NO: 163 - DNA, 1530 bp, Serratia marcescens 90-166
atggcagaaagtaatgcggcaattcaatcggctgcaattatcggcgcgggaacgatgggcagaggcatcgcttatcttttcgcgcaaaaaggcattcgtacggtgctttataatcgcaacggcaataccctcattcaggctcgtgaatatatcgtgcaagacctggacaaaaagatcgaacagggcagggtcgcgccgcaggataaagacgcggtgctggctaatctgacgttctccgcggaatttggggccatcgtcgacagcgatctggtgatcgaaaccattgcagagcatgagcaagccaaactcgaggtgctggcggccatcgccgcgacggtcaagcccgacacgctgatcgccaccaatacctcctcactgtcgctgaataagctggcgacggcggtgacgcacagcgaacgctttatcggtttgcactttttcaaccccgcgccgctgatgaagctgattgaaatcattccggcctattttaccgcacaggtcaccaccgaacgttgccgtcaactggtggcggcattggggaaacgcgatgtcgtctgtcaggccacgccggggtttatcgtcaaccgtatggctcgcccctactatctggaagggttccgcctgttggaagaacacgtggcacgtgcgccgcagatcgaccgcgccctcaaagccggcggacactttcgcatggggccgctcgagctgaccgattttatcggtcaggacatcaactatcaggtcagccggcaaatttggcaggacatgcagtacgatccgcgctataccccgggccatctgcagcgctcgctggtcgatgccggtctgttgggcaaaaagaacggccgctcctatttttccgccgaagaatctcccccgccgcttgcagccgccgtcgatgcggagatcgagacgctgcgcatttacggtgaacatcctctctttaccctgctacagcagcgggccgccctgcaatggccgcggctgcgcgtggaacaccggccgacattaccgggcctgggcgccgccattcaggtcaatgatgctttcaccgtcagcgttaccgatggtcgcacggcaaaccagcttgccgaacagaccgcggcggacgcctttgtcgtcgatgtcgccctgaactacggcgatacggcgtacctggcggcggcgcatagccgccacgcctctgcggccaataaggcgctgtttttacgcctgctgcacaccgcgatcccccaggtggaatttatcaaggattccccggccttgatcgtcgcccgcgtgctcagcagcctgatcaacgagtcggtgatcatggtggaaagcggcgtctgcagccgggaagacattgatgtcgccgccgtcgccggcgtgaactacgccgacggtattttcgtctggctcactcgcctcggggaggaaaatgtcaggacgacgctgagcaacctggcgcaattgctgcacgcggcgcgctatgcaccgcattacacccttctgcacgccgcccaaccggcgctgacctccacgccttaa

SEQ ID NO: 164 - DNA, 1530 bp, Serratia marcescens UMH2
atggcagaaagtaatgcggcaattcaatcggctgcgattatcggcgcgggaacgatgggcagaggcatcgcttatcttttggcgcaaaaaagcattcgtacggtgctttataatcgcaacggcaataccctcaatcaagctcgcgacgctatcgtgcaagatctgaacaaaaaggtggaacagggcaagctcgcgctgcaggacaaagacgcggtgctggctaatctgacgttctccacggaatttggggccatcgccgacagcgatctggtgatcgaaaccatcgcagagcatgagcaagccaaactcgaagtgctggcggccatcgccgcgacggtcaagcccgacacgctgatcgccaccaatacctcctcactgtcgcttaataagctggcgacggcggtgacgcacagcgaacgctttatcggtttgcactttttcaaccccgcgccgctgatgaagctgattgaaatcattccggcctattttaccgcacaggtcaccaccgaacgttgccgtcaactggtggcggcgttggggaaacgcgatgtcgtctgtcaggccacgccgggatttatcgtcaaccgtatggcccgcccctactatctggaagggttccgcctgttggaagaacacgtggcgcgtgcgccgcagatcgaccgcgccctcaaagccggcggacactttcgcatggggccgctcgagctgaccgattttatcggtcaggacatcaactatcaggtcagccggcaaatttggcaggacatgcagtacgatccgcgctataccccgggccatctgcagcgctcgctggtcgatgccggtctgttgggcaaaaagaacggccgctcctatttttccgccgaagaatctcccccgccgcttgcggccgccgtcgatgcggaggtcgaggcgctacgcatttacggtgaacatcctctctttaccctgctacagcagcgggccgccctgcaatggccgcggctgcgcgtggaacaacggccgacattaccgggcttgggcgccgccattcaggtcaatgacgctttcaccgtcagcgttaccgatggccgcacggcaaaccagcttgccgaacagaccgcggcggacgcctttgtcgtcgatgtcgccctgaactacggcgatacggcgtacctggtggcggcgcatagccgccacgcctctgcggccaataaggcgctgtttttacgcctgctgcacaccgcgatcccgcaggtggaatttatcaaggattccccggccctgatcgtcgcccgcgtgctcagcagcctgatcaacgagtcggtgatcatggtggaaagcggcgtctgcagccgggaagacattgatgtcgccgccgtcgccggcgtgaactacgccgacggtattttcggctggctcactcacctcggggaggaaaatgtcaggacgacgctgagcaacctggcgcaattactccacgcggcgcgctatgcgccgcattacacccttctgcacgccgcccaaccggcgctgaccaccacgccttaa

SEQ ID NO: 165 - DNA, 1530 bp, Serratia plymuthica AS9
atggcagagaataattcggcaatccgttcagccgccgttattggtgcgggaaccatgggcagaggcatcgcctatctcctggcgctgaacggcatacgaaccgtactttataatcgcaatggtaataatctcaatcaggcccgtgactatattgtcagtgacctggacagaaaaatggataacggaaaaataaccctgcagaaaaaaggccagatattagccaatattattttctcggccgtctttgacgccataaccgacagcgatctggtgattgaaaccattgcggaagatgagcaaaccaagcatgaaatcctggcagccattgcggctacggtaaaaccagaggcgatcattgcgaccaatacctcctcgttgtcgctgaacaaactggcggcgggggtggaaaacaatccgcgctttatcggcctgcattttttcaatccggcgccgctgatgaagttgatcgaaatcattccctcttattttacctcccacaccaccagcctacgctgccagcagttggtaatagcgttgggtaaacagtttgtggtctgcaaagccacgccgggctttattgttaatcgcatggcgcgacctttctatctggaagggttccggctgctggaggaaaacgtggcacaggctccacagatcgaccgcgccctcaaggcaggcgggcattttcgcatggggcccttagaactgactgattttattggccaggatatcaactatcaggtcagcaagcagatttggcaggatatgcagttcgactcccgctatacccccggccatttgcaacgctcgctggtggatgccgggctgctggggaggaagaacgggcgctctttttttgcttccctaccggctacaccgcccaccccggccacagagagcgacacaccaacttcactgcatttttatggtgaacacgctttattcgatcacctgcaacagcgcgctttggccacctggcctgcgctgcgcgttcagcggttgccggaacggccggaactggggcgtcttatcctggtgaataacacgctggcgatcaaaatcaccgatggcagaacggcgaacctgctcgccggcttaaccgctctcgacaccttcgtgattgacgctgcgctgaattacgccgacaccgcctatctggtggccgcccacaatcagcatgccacagaggcgaataaagcgctgtttctgtcgctgctgcaaaccgtcatcgctcaggtagagtttattaaagattcccctgccctgatcgttgcccgcgtactgagcagcctgatcaacgaatcggtgatcatggtggagagcggcgtttgcagccgggcggatatcgatatcgccgccgtggccggcgtgaactatgccgacggcatttttgcctggctggcgcagctcgggcagaaaaacgtgaagtcgacgctggataacatggcgcaattgctgcactccgcgcgctattacccgcattactcattgctgaacgcggcccggcctgagctggctgtagcgccctaa

SEQ ID NO: 166 - DNA, 1530 bp, Serratia plymuthica tumat 205
atggcagagaataattcggcaatccgttcagccgccgttattggtgcggggactatgggcagaggcatcgcctacctcttggcactgaacggcatacgaaccgtactttataatcgcaatggtaataatctcaatcaggcccgtgactatattgtcagcgacctggacagaaaaatagataacggaaaaataaccctgcagaaaaaaggccagatattagccaatattattttctcggccgtctttgacgccataaccgacagcgatctggtgattgaaaccattgcggaagatgagcaaaccaagcatgaaatcctggcagccattgcggctacggtaaaaccggaggcgatcattgcgaccaatacctcctcgttgtcgctgaacaaactggcggcaggggtggaaaacaacccgcgctttatcggcctgcattttttcaatccggcgccgctgatgaagttgatcgaaatcattccctcttattttacctcccacgccaccagcctacgctgccagcagttggtaatagcattgggtaaacagtttgtggtctgcaaagccacaccgggctttattgttaatcgcatggcgcggcctttctatctggaagggttccggctgctggaggaaaacgtggcgctggcgccacagatcgaccgcgccctcaaggccggcgggcattttcgcatggggcctttagaactgacggattttatcggtcaggatatcaactaccaggtcagcaagcagatttggcaggatatgcagttcgaccctcgctatacccctggtcatttgcaacgctcgctggtggatgccgggctgctggggaggaaaaacgggcgctctttttttgcttcccaaccggtgacgccacccaccccgaccacagagagcgacacgccaacttcactgcatttttatggggagcatgctttattcgatcatctgcaacagcgtgctctggccacctggcctgcgctgcgcgttcagcggttgccggaacggcctgaactggggcgatttatcctggtgaataacgcgatggcgatcaaaatcaccgatggcagaacggcaaacctgctcgccggcttaaccgctctcgacaccttcgtgattgacgctgcgctgaattacgccgacaccgcctatctggtggccgcccacaatcaacatgccacagagacgaataaagcgctgtttctgacgctgctgcaaaccgtcatcgctcaggtggagtttattaaagattcccctgctctgatcgttgcccgcgtactgagcagcctgatcaatgaatcggtgatcatggtggagagcggcgtttgcagccgggcagatatcgatatcgccgccgtggccggcgtgaactatgccgacggcatttttgcctggttggcgcagctcgggcagaaaaacgtgaaatcgacgctggataacatggcgcaactgctgcactccgcgcgctattacccgcattactcattgctgaacgcggcccggcctgagctggccgtagcgccctaa

SEQ ID NO: 167 - DNA, 1530 bp, Serratia plymuthica A30
atggcagagaataattcggcaatccgttcagccgccgttattggtgcggggaccatgggcagaggcatcgcctacctcctggcactgaacggcatacgaaccgtactttataatcgcaatggtaataatctcaatcaggcccgtgactatattgtcagcgacctggacagaaaaatagataacggaaaaataaccctgcagaaaaaaggccagatattagccaatattattttctcggccgtctttgacgccataaccgacagcgatctggtgattgaaaccattgcggaagatgagcaaaccaagcatgaaatcctggcagccattgcggctacggtaaaaccggaggcgatcattgcgaccaatacctcctcgttgtcgctgaacaaactggcggcaggggtggaaaacaacccgcgctttatcggcctgcattttttcaatccggcgccactgatgaagttgatcgaaatcattccctcttattttacctcccacgccaccagcctacgctgccagaagttggtaatagcattgggtaaacagtttgtggtctgcaaagccacgccgggctttattgttaatcgcatggcgcggcctttctatctggaagggttccggctgctggaggagaacgtggcgctggcgccacagatcgaccgcgccctcaaggccggcgggcattttcgcatggggcctttagaactgacggattttatcggccaggatatcaactaccaggtcagcaagcagatttggcaggatatgcagttcgaccctcgctatacccctggtcatttgcaacgctcgctggtggatgccgggctgctggggaggaaaaacgggcgctctttttttgcttcccaaccggcgacgccgcccaacccgaccactgagggcgacacgccaacttcactgcatttttatggtgaacacgctttattcgatcacctgcaacagcgcgctttggccacctggcctgcgttgcgcgttcagcggttgccggaacggccggaactggggcgttttatcctgatgaataacaggctggcgatcaaaatcactgatggcagaacggcgaacctgctcgccggcttaaccgctctcgacaccttcgtgattgacgccgcgctgaactacgccgacaccgcctatctggtggccgcccacaatcaacatgccacagagacgaataaagcgctgtttctgacgctgctgcaaaccctcatcgctcaggtggagtttattaaagattcccctgccctgatcgttgcccgcgtactgagcagcctgatcaatgaatcggtgatcatggtggagagcggcgtttgcagccgggcagatatcgatatcgccgccgtggccggcgtgaactatgccgacggtatttttgcctggttggcgcagctcgggcagaaaaacgtgaaatcgacgctggataacatggcgcaactgctgcactccgcgcgctattacccgcattactcattgctgaacgcggcccggcctgagctggccgtagcgccctaa

SEQ ID NO: 168 - DNA, 1530 bp, Serratia plymuthica 4Rx13
atggcagagaataattcggcaatccgttcagccgccgttattggtgcggggaccatgggcagaggcatcgcctacctcctggcgctgaacggcatacgaaccgtactttataatcgcaatggtaatagtctcaatcaggcccgtgactatattgtcagcgacctggacagaaaaatagataacggaaaaataaccctgcagaaaaaaggccagatattagccaatattattttctcggccgtctttgacgccataaccgacagcgatctggtgattgaaaccattgcggaagatgagcaaaccaagcatgaaatcctggcagccattgcggctacggtaaaaccggaggcgatcattgcgaccaatacctcctcgttgtcgctgaacaaactggcggcaggggtggaaaacaacccgcgctttatcggcctgcattttttcaatccggcgccgctgatgaagttgatcgaaatcattccctcttattttacctcccacgccaccagcctacgctgccagaagttggtaatagcattgggtaaacagtttgtggtctgcaaagccacgccgggctttattgttaatcgcatggcgcggcctttctatctggaagggttccggctgctggaggagaacgtggcgctggcgccacagatcgaccgcgccctcaaggccggcgggcattttcgcatggggcctttagaactgacggattttatcggtcaggatatcaactaccaggtcagcaagcagatttggcaggatatgcagttcgaccctcgctatacccccggccacttgcaacgctcgctggtggatgccgggctgctggggaggaaaaacgggcgttctttttttgcttcccaaccggcgacgccacccaccccgaccacagagagcgacacgccaacttcactgcatttttatggtgagcacgctttattcgatcatctgcaacagcgcgctctggccacctggcctgcgctgagcgttcagcggttgccggaacggcctgaactggggcgatttatcctggtgaataacgcgctggcgatcaaaatcaccgatggcagaacggcaaacctgctcgccggcttaaccgctctcgacaccttcgtgattgacgctgcgctgaattacgccgacaccgcctatctggtggccgcccacaatcaacatgccacagagacgaataaagcgctgtttctgacgctgctgcaaaccgtcatcgctcaggtggagtttattaaagattcccctgccctgatcgttgcccgcgtactgagcagcctgatcaatgaatcggtgatcatggtggagagcggcgtttgcagccgggcagatatcgatatcgccgccgtggccggcgtgaactatgccgacggcatttttgcctggttggcgcagctcgggcagaaaaacgtgaaatcgacgctggataacatggcgcaactgctgcattccgcgcgctattacccgcattactcattgctgaacgcggcccggcctgagctggccgtagcgccctaa

SEQ ID NO: 169 - DNA, 1530 bp, Serratia plymuthica V4
atggcagagaataattcggcaatccgttcagccgccgttattggtgcggggaccatgggcagaggcatcgcctacctcctggcactgaacggcatacgaaccgtactttataatcgcaatggtaataatctcaatcaggcccgtgactatattgtcagcgacctggacagaaaaatagataacggaaaaataacccttcagaaaaaaggccagatattagccaatattattttctcggccgtctttgacgccataaccgacagcgatctggtgattgaaaccattgcggaagatgagcaaaccaagcatgaaatcctggcagccattgcggctacggtaaaaccggaggcgatcattgcgaccaatacctcctcgttgtcgctgaacaaactggcggcaggggtggaaaacaacccgcgctttatcggcctgcattttttcaatccggcgccgctgatgaagttgatcgaaatcattccctcttattttacctcccacgccaccagcctacgctgccagaagttggtaatagcattgggtaaacagtttgtggtctgcaaagccacgccgggctttattgttaatcgcatggcgcggcctttctatctggaagggttccggctgctggaggaaaacgtggcgctggcgccacagatcgaccgcgccctcaaggccggcgggcattttcgcatgggccctttagaactgacggattttatcggccaggatatcaactaccaggtcagcaagcagatttggcaggatatgcagttcgaccctcgctatacccctggtcatttgcaacgctcgctggtggatgccgggctgctggggaggaaaaacgggcgctctttttttgcttcccaaccggcgacgccacccaccccgaccacagagagcgacacgccaacttcactgcatttttatggtgaacacgctttattcgatcacctgcaacagcgcgctttggccacctggcctgcgttgcgcgttcagcggttgccggaacggccggaactggggcgttttatcctggtgaataacaggctggcgatcaaaatcaccgatggcagaacggcaaacctgctcgccggcttaaccgctctcgacaccttcgtgattgacgctgcgctgaattacgccgacaccgcctatctggtggccgcccacaatcaacatgccacagagacgaataaagcgctgtttctgacgctgctgcaaaccgtcatcgctcaggtggagtttattaaagattcccctgccctgatcgttgcccgcgtactgagcagcctgatcaatgaatcggtgatcatggtggagagcggcgtttgcagccgggcagatatcgatatcgccgccgtggccggcgtgaactatgccgacggtatttttgcctggttggcgcagctcgggcagaaaaacgtgaaatcgacgctggataacatggcgcaactgctgcactccgcgcgctattacccgcattactcattgctgaacgcggcccggcctgagctggccgtagcgccctaa

SEQ ID NO: 170 - DNA, 1530 bp, Serratia plymuthica 3Rp8
atggcagagaataattcggcaatccgttcagccgccgttattggtgcggggaccatgggcagaggcatcgcctacctcctggcactgaacggcatacgaaccgtactttataatcgcaatggtaataatctcaatcaggcccgtgactatattgtcagcgacctggacagaaaaatagataacggaaaaataaccctgcagaaaaaaggccagatattagccaatattattttctcggccgtctttgacgccataaccgacagcgatctggtgattgaaaccattgcggaagatgagcaaaccaagcatgaaatcctggcagccattgcggctacggtaaaaccggaggcgatcattgcgaccaatacctcctcgttgtcgctgaacaaactggcggcaggggtggaaaacaacccgcgctttatcggcctgcattttttcaatccggcgccgctgatgaagttgatcgaaatcattccctcttattttacctcccacgccaccagcctacgctgccagaagttggtaatagcattgggtaaacagtttgtggtctgcaaagccacgccgggctttattgttaatcgcatggcgcggcctttctatctggaagggttccggctgctggaggagaacgtggcgctggcgccacagatcgaccgcgccctcaaggccggcgggcattttcgcatggggcctttagaactgacggattttatcggccaggatatcaactaccaggtcagcaagcagatttggcaggatatgcagttcgaccctcgctatacccctggtcatttgcaacgctcgctggtggatgccgggctgctggggaggaaaaacgggcgctctttttttgcttcccaaccggcgacgccacccaccccgaccacagagagcgacacgccaacgtcactgcatttttatggtgaacacgctttattcgatcacctgcaacagcgcgctttggccacctggcctgcgttgcgcgttcagcggttgccggaacggccggaactggggcgttttatcctggtgaataacaggctggcgatcaaaatcaccgatggcagaacggcgaacctgctcgccggcttaaccgctctcgacaccttcgtgattgacgccgcgctgaactacgccgacaccgcctatctggtggccgcccacaatcaacatgccacagagacgaataaagcgctgtttctgacgctgctgcaaaccctcatcgctcaggtggagtttattaaagattcccctgctctgatcgttgcccgcgtactgagcagcctgatcaatgaatcggtgatcatggtggagagcggcgtttgcagccgggcagatatcgatatcgccgccgtggccggcgtgaactatgccgacggcatttttgcctggttggcgcagctcgggcagaaaaacgtgaaatcgacgctggataacatggcgcaactgctgcactccgcgcgctattacccgcattactcattgctgaacgcggcccggcctgagctggccgtagcgccctaa

SEQ ID NO: 171 - DNA, 1530 bp, Serratia proteamaculans MFPA44A14
atggcagagaataattcggcaatccattcggtcgctgttattggtgccggaaccatgggcagaggtattgcctatcttctggcgcagaacggcatacgaaccctgctttataatcgtagcggtaataatctggatcaggcccgcgactatattatccgtgacctggataagaaaatagacaacgggaaaataagcccacagaaaaaaggcgaagtattggccaacctggttttctctcccattttcgatgctatcgccgacagcgacctggtgattgaaaccatcgcggagcatgagaccaccaagcatgaaatcctcgcggcgattgcggccacggtgaaacaagaggccattatcgccaccaacacctcatcgctgtcgttgaataagctggcggcaggcgtcgaaaacaacgcccgttttatcggcctgcacttcttcaatccggccccgctgatgaaactgatcgagattattccgtcctattttaccagccgggccaccagcctgcgctgccagcagttggtgacggcgctaggcaaacagtttgtggtctgcaaagccacgccgggttttatcgtcaaccggatggcacggcctttttatctggaaggattccggctgttggaagaaaacgtggcattagcaccgcagatcgaccgcgccctcaaggccggtggccactttcgcatgggccctttggagctgaccgactttatcggccaggatattaactatcaggtcagcagccagatttggcaggacatgcaatacgacccccgctatacccccggtcatttgcaacgttcgctggtggatgccgggttgctggggaagaaaaacggccgatccttttttgctgccccttctgccgaatccaacctcctcgacgcaggcaacggtacgctgacttccctgcatttttatggcgaacataccctgtttgacctgctgcaacagcgcgccttggctacttggccaacgctgcagattattcaccagccggaacggccaacgctgggacgctttatccgggtgaatgacgcattggccgtcaaaatcaccgacggccgcaccgccaatctgctcgctgaattgaccgatctcgacacctttgtgatcgacgccgcactgaattacagcgataccacctatctggtggccgcccacaatcaggacgccgccgaggccaataaagcgctgtttctgtcgctgctgcaaacgttgatcccgcaggtggagtttattaaagactctccaggcctgatcgtcgcccgggttctgagcagtctgatcaatgagtcggtgatcatggtggagagcggggtttgcagccgggcagatatcgatattgccgccgtggcgggcgttaactatgccgatggcatctttgcctggctgacgcagctcgggcaaaaaaacgtgaaatcaacgctggataatatggcgcaactgctgcattccgcccgctattacccgcattactcattgctgaatatcccccggcccgagctggccgtcgcgccgtaa

SEQ ID NO: 172 - DNA, 1530 bp, Serratia plymuthica A153
atggcagagaataattcggcaatccgttcagccgccgttattggtgcggggaccatgggcagaggcatcgcctatctcctggcgctgaacggcatacgaaccgtactttataatcgcaatggtaataatctcaatcaggcccgtgactatattgtcagcgacctggacagaaaaatagataacggaaaaataaccctgcagaaaaaaggccagatattagccaatattattttctcggacgtctttgacgccataaccgacagcgatctggtgattgaaaccattgcggaagatgagcaaaccaagcatgaaatcctggcagccattgcggcgacggtaaaaccggaggcgatcattgcgaccaatacttcctcgctgtcgctgaacaaactggcggcgggggtggaaaacaacccgcgctttatcggcctgcattttttcaatccggcgccgctgatgaagttgatcgaaattattccctcttatttcacctctcgcgccaccagtctacgctgccagcagttggtaacagcgttgggtaaactgtttgtggtctgcaaagccacgccgggctttattgttaatcgcatggcgcggcctttctatctggaagggttccggctgctggaggaaaacgtggcgctggctccacagatcgaccgcgccctcaaggccggcgggcattttcgcatggggcctttagaactgactgattttatcggccaggatatcaactatcaggtcagcaaacagatttggcaggatatgcagttcgatccccgctatacccccggccatttgcaacgctcgctggtggatgccgggctgctggggaggaaaaacgggcgctctttttttgcttcccaacctgctacaccgcccaacccgaccactgagggccacacgccaacttcactgcttttttatggtgaacacgctttattcgatcacctgcaacagcgcgctttggccacctggcctgcgctgcgcgttcagcggttgccggaacggccggaactgggacgttttatcctggtgaataacaggctggcgatcaaaatcaccgatggcagaacggcgaacctgctcgccggcttaaccgctctcgacaccttcgtgattgacgccgcgctgaactacgccgacaccgcctatctggtggccgcccacaatcaacatgccacagagccgaataaagcgctgtttctgacgctgctgcaaaccctcatcgctcaggtggagtttattaaagattcccctgccctgatcgttgcccgcgtactgagcagcctgatcaatgaatcggtgatcatggtggagagcggcgtttgcagccgggcagatatcgatatcgccgccgtggccggcgtgaactatgccgacggcatttttgcctggttggcgcagctcgggcagaaaaacgtgaaatcgacgctggataacatggcgcaattgctgcactccacgcgctattacccgcattactcattgctgaacgcggcccggcctgagctggctgtagcgccctaa

SEQ ID NO: 173 - protein, 24 aa, Artificial Sequence
  consensus sequence 1
  misc_feature (13)..(13): Xaa can be any naturally occurring amino acid
  misc_feature (15)..(17): Xaa can be any naturally occurring amino acid
  misc_feature (19)..(19): Xaa can be any naturally occurring amino acid
  misc_feature (21)..(21): Xaa can be any naturally occurring amino acid
GAGTMGRGIAYLXAXXXIXTXLYN

SEQ ID NO: 174 - DNA, 774 bp, Pseudomonas putida KT2440
atgccgcgatatatcgatgtgcaggcgcccgaacatggcgttcagctcattaccctgcaacggcccgaggccttgaatgccctgtgcaccgagctactggcagaactggccgctgcgctgcaggctgccgggaacgacgagcatgtccgtgccacagtgattaccggcagcgccaaggcattcgccgcaggcgccgacatccgcgagatggccgatcgcgacctggtcggcatcctcaatgacccgcgcgtagcgcattggcaaagcatcgccgcattcgccaaaccgctgattgctgcagtcaacggctatgccctgggtggcggttgcgaactggcaatgtgcgccgacatcgtcatcgccagtaccgacgcccgtttcggccagccggaaatcaaccttggcatcatccccggtgctggcggcacccagcgcctgttacgtgccgtcggtaagccgttggccatgcagatggtgctgacgggggaagccatcactgccctccgcgcccagcaggccggcctggtcagcgaaatcacccagcccgaactcaccgtagaacgcgccatgcaggttgcccgcagcatcgccgccaaagcgccgctggctgtgcgcctggccaaggaggcgttactgaaggccggtgataccgacctggccagcggcctgcgcttcgagcgccatgccttcaccctgctggcgggcaccgccgaccgcgatgaaggcatccgcgccttccaggaaaagcgccaggcccgcttccaagggcgctga

SEQ ID NO: 175 - DNA, 696 bp, Pseudomonas putida KT2440
ttgatcaataaaacgtacgagtccatcgccagcgcggtggaagggattaccgacggttcgaccatcatggtcggtggcttcggcacggctggcatgccgtccgagctgatcgatggcctcattgccaccggtgcccgcgacctgaccatcatcagcaacaacgccggcaacggcgagatcggcctggccgccctgctcatggcaggcagcgtgcgcaaggtggtctgctcgttcccgcgccagtccgactcctacgtgttcgacgaactgtaccgcgccggcaagatcgagctggaagtggtcccgcagggcaacctggccgagcgtatccgcgccgcaggctccggcattggtgcgttcttctcgccaaccggctacggcaccctgctggccgagggcaaggaaacccgtgagatcgatggccgcatgtacgtgctggaaatgccgctgcacgccgacttcgcactgatcaaggcgcacaagggtgaccgttggggcaacctgacctaccgcaaggccgcccgcaacttcggcccgatcatggccatggctgccaagaccgccatcgcccaggtcgaccaggtcgtcgaactcggtgaactggacccggaacacatcatcaccccgggtatcttcgtccagcgcgtggtcgccgtcaccggtgctgccgcttcttcgattgccaaagctgtctga

SEQ ID NO: 176 - DNA, 642 bp, Pseudomonas putida KT2440
atgaccatcaccaaaaagctctcccgcaccgagatggcccaacgcgtggccgcagacatccaggaaggcgcgtacgtaaacctgggcatcggcgcaccgaccctggtggccaactacctgggcgacaaggaagtgttcctgcacagcgagaacggcctgctgggcatgggcccaagccctgcgccgggcgaggaagacgatgacctgatcaacgccggcaagcagcacgtcaccctgctgaccggtggtgccttcttccaccatgccgattcgttctcgatgatgcgtggcggccacctggacatcgctgtactgggcgccttccaggtgtcggtcaagggcgacctggccaactggcacacgggtgccgaaggctcgatcccggccgtaggcggtgcaatggacctggccaccggcgcccgccaggtgttcgtgatgatggaccacctgaccaagaccggcgaaagcaagctggtgcccgagtgcacctacccgctgaccggtatcgcttgcgtcagccgcatctacaccgacctggccgtactggaagtgacacctgaagggctgaaagtggtcgaaatctgcgcggacatcgactttgacgagctgcagaaactcagtggcgtgccgctgatcaagtga

SEQ ID NO: 177 - DNA, 774 bp, Pseudomonas putida KT2440; identical to SEQ ID NO: 174

SEQ ID NO: 178 - protein, 505 aa, Pseudomonas putida KT2440
MAALASNVQVAVIGAGAMGAGIAQVAAQAGHPVKLYDNRPGAAAQAVTGIDRQLARLVDKGKLLAAERETINARLCPVDTLEALADAGLVIEAIVENLQVKQALFSQLETLCAADCILASNTSSLSITSLAAGLERPQHVVGMHFFNPAPLMALVEVVSGLATDPAVAACIYATAQAWGKQPVHARSTPGFIVNRVARPFYAESLRLLQEGAADCASLDALMRDSGGFRMGAFELTDLIGHDVNYAVTCSVFDAFYGDFRFQPSLVQKELVDAGHLGRKTGQGFYRYAEGVERPQPAELHSSACAEACVVEGNLGVMQPLVERLRQSGIAVTQRAGSGLIQVGDATLALSDGRLASQRAREDGLRNLVLLDLALDYSSATRIAISWSADTSDSARDQAVALLQRAGLKVTGVADLPGLVVLRTVAMLANEAADAVLQGVGSAADIDLAMRAGVNYPCGPLAWAANIGIAHTLRVLDNLQCSYGESRYRPSLLLRRCEAKGGTLHD

SEQ ID NO: 179 - protein, 475 aa, Escherichia coli str. K-12 substr. MG1655
MMINVQTVAVIGSGTMGAGIAEVAASHGHQVLLYDISAEALTRAIDGIHARLNSRVTRGKLTAETCERTLKRLIPVTDIHALAAADLVIEAASERLEVKKALFAQLAEVCPPQTLLTTNTSSISITAIAAEIKNPERVAGLHFFNPAPVMKLVEVVSGLATAAEVVEQLCELTLSWGKQPVRCHSTPGFIVNRVARPYYSEAWRALEEQVAAPEVIDAALRDGAGFPMGPLELTDLIGQDVNFAVTCSVFNAFWQERRFLPSLVQQELVIGGRLGKKSGLGVYDWRAEREAVVGLEAVSDSFSPMKVEKKSDGVTEIDDVLLIETQGETAQALAIRLARPVVVIDKMAGKVVTIAAAAVNPDSATRKAIYYLQQQGKTVLQIADYPGMLIWRTVAMIINEALDALQKGVASEQDIDTAMRLGVNYPYGPLAWGAQLGWQRILRLLENLQHHYGEERYRPCSLLRQRALLESGYES

SEQ ID NO: 180 - protein, 505 aa, Acinetobacter baylyi ADP1
MTHPIKKIAIIGVGVMGSGIAQIAAQSGHITYLYDAKAGAAQQAKQQLAITFQKLLDKNKITTEYADAANANLLIANELHDLKDCDLIVEAIVERLDIKQSLMSQLEAIVPETTILASNTSSLSITAIASNCKHPERVAGYHFFNPVPLMKVVEVIQGLKTDPKHIETLNQLSRVLGHRPVVAKDTPGFIINHAGRAYGTEALKILNENVTDISEIDRILRDGVGFRMGPFELMDLTGLDVSHPVMESIYHQYYEEARYRPNSLTKQMLEAKQLGRKVGQGFYDYRTGSKTGETSAKVAERLTLYPKVWIAADFEDDKQLLINYLTTHNIQLDVGAKPQADSLCLLACYGEDTTHAALRLNVNPAHSVAIDMLYGIEKHRTLMPSLITEVTYSHAAHSIFNLDGAMVSTIGESIGFVAQRILAMVINLGCDIAQQAIASVDDINAAVRLGLGYPFGPIEWGDEIGSNKILLILNRITALTSDPRYRPSPWLQRRVALNLPLTFTT

SEQ ID NO: 181 - protein, 506 aa, Serratia plymuthica NBRC102599
MSLPNFNGTVAVIGAGTMGIGIAQVAAHAGHQVKLFDIAATAAQNALGALSLRLRQRVAAGKADADATEALLARIQPVDTLEQLADSTLIIEAVAEKLAIKQSLFRELEALCSPATLFASNTSSLSITAIGGALQHPQRLAGLHFFNPAPLMTLVEIVSGLDTGADTVATLQTLARQWGKQSVLCRSTPGFIVNRVARPFYAETLRALEERVADVATLDAVMRDAGCFAMGPLQLTDLIGQDINYAVTESVFQAFFQDPRFTPSLVQQELVAAGRLGRKSGCGFYRYDGEQTSSTAVCLPLSQAEPPRSIQLHGDEAGVAFLAGLLTGNAEAIIQPGQTSAFARIDEVTFMLTNGKTASQIAEETGTPVVLFDLSANYSQAPCVAISCAMQNDARHNDKVVRLLQSFGKQVILLPDYPGLLVMRTLAMLSNEALDAVNKGVASAEDIDSALRCGVNYPRGPLEWGAALGWRQILATLENLHRYYGEPRYRPMPLLRHYAFLSSGAE

SEQ ID NO: 182 - protein, 470 aa, Escherichia coli str. K-12 substr. MG1655
MKKTKIVCTIGPKTESEEMLAKMLDAGMNVMRLNFSHGDYAEHGQRIQNLRNVMSKTGKTAAILLDTKGPEIRTMKLEGGNDVSLKAGQTFTFTTDKSVIGNSEMVAVTYEGFTTDLSVGNTVLVDDGLIGMEVTAIEGNKVICKVLNNGDLGENKGVNLPGVSIALPALAEKDKQDLIFGCEQGVDFVAASFIRKRSDVIEIREHLKAHGGENIHIISKIENQEGLNNFDEILEASDGIMVARGDLGVEIPVEEVIFAQKMMIEKCIRARKVVITATQMLDSMIKNPRPTRAEAGDVANAILDGTDAVMLSGESAKGKYPLEAVSIMATICERTDRVMNSRLEFNNDNRKLRITEAVCRGAVETAEKLDAPLIVVATQGGKSARAVRKYFPDATILALTTNEKTAHQLVLSKGVVPQLVKEITSTDDFYRLGKELALQSGLAHKGDVVVMVSGALVPSGTTNTASVHVL

SEQ ID NO: 183 - protein, 480 aa, Escherichia coli str. K-12 substr. MG1655
MSRRLRRTKIVTTLGPATDRDNNLEKVIAAGANVVRMNFSHGSPEDHKMRADKVREIAAKLGRHVAILGDLQGPKIRVSTFKEGKVFLNIGDKFLLDANLGKGEGDKEKVGIDYKGLPADVVPGDILLLDDGRVQLKVLEVQGMKVFTEVTVGGPLSNNKGINKLGGGLSAEALTEKDKADIKTAALIGVDYLAVSFPRCGEDLNYARRLARDAGCDAKIVAKVERAEAVCSQDAMDDIILASDVVMVARGDLGVEIGDPELVGIQKALIRRARQLNRAVITATQMMESMITNPMPTRAEVMDVANAVLDGTDAVMLSAETAAGQYPSETVAAMARVCLGAEKIPSINVSKHRLDVQFDNVEEAIAMSAMYAANHLKGVTAIITMTESGRTALMTSRISSGLPIFAMSRHERTLNLTALYRGVTPVHFDSANDGVAAASEAVNLLRDKGYLMSGDLVIVTQGDVMSTVGSTNTTRILTVE

SEQ ID NO: 184 - protein, 470 aa, Serratia grimesii NBRC13537
MKKTKIVCTIGPKTESEEMLTNLLNAGMNVMRLNFSHGDYEEHGNRIKNMRAVMAKTGQNAGILLDTKGPEIRTMKLEGGKDAALVAGQTFTFTTDQSVIGNNERVAVTYAGFSADLKIGNTVLVDDGLIGMEVTNVTENEVVCKVLNSGDLGENKGVNLPGVSIQLPALAEKDKRDLIFGCEQGVDFVAASFIRKRSDVLEIREHLKAHGGEQIQIISKIENQEGLNNFDEILEASDGIMVARGDLGVEIPVEEVIFAQKMMIEKCNRARKVVITATQMLDSMIKNPRPTRAEAGDVANAILDGTDAVMLSGESAKGKYPLEAVTIMATICERTDRVMPSRIDSLNDNRKLRITEAVCRGAVETAEKLDAPLIVVATSGGKSAKSVRKYFPNAVILALTTNEVTAHQLILSKGVIPQMVKEIASTDDFYRIGKEAALASGLAQKGDVVVMVSGALVPSGTTNTASVHVL

SEQ ID NO: 185 - protein, 480 aa, Serratia grimesii NBRC13537
MSRRLRRTKIVTTLGPATDRDNNLEKIIAAGANVVRLNFSHGSAEDHQARADKVREIAAKLGRHVAILGDLQGPKIRVSTFKEGKIFLNIGDKFLLDANMSKGEGDKEKVGIDYKGLPADVVPGDVLLLDDGRVQLKVLEVQGMKVFTEVTVGGPLSNNKGINKLGGGLSAEALTEKDKADIVTAAKIGVDYLAVSFPRTGEDLNYARRLARDAGCNAKIVSKVERAEAVCSDEAMDDIILASDVVMVARGDLGVEIGDPELVGIQKKLIRRARTLNRAVITATQMMESMITNPMPTRAEVMDVANAVLDGTDAVMLSAETAAGQYPAETVAAMARVCLGAEKIPSINVSKHRLDVQFDNIEEAIAMSSMYAANHLKGVTALIAMTESGRTALMMSRISSGLPIFAMSRHEHTLNLTALYRGVTPVYFDSHEDGVIAANDAVNRLRDKGFLVSGDLVIVTQGDVMETVGTTNTSRILRVE

SEQ ID NO: 186 - DNA, 200 bp, Escherichia coli str. K-12 substr. MG1655
cgtaattgccctttaaaattcggggcgccgaccccatgtggtctcaagcccaaaggaagagtgaggcgagtcagtcgcgtaatgcttaggcacaggattgatttgtcgcaatgattgacacgattccgcttgacgctgcgtaaggtttttgtaattttacaggcaaccttttattcactaacaaatagctggtggaatat

SEQ ID NO: 187 - DNA, 30 bp, Artificial Sequence
  primer
taccgtcgacctcgacgtaattgcccttta

SEQ ID NO: 188 - DNA, 41 bp, Artificial Sequence
  primer
ggccccccctcgagtcattaagtactatattccaccagcta

SEQ ID NO: 189 - DNA, 774 bp, Pseudomonas putida KT2440; identical to SEQ ID NO: 174

SEQ ID NO: 190 - DNA, 32 bp, Artificial Sequence
  primer
ctggtggaatatatgcacgacgtattcatctg

SEQ ID NO: 191 - DNA, 41 bp, Artificial Sequence
  primer
ctcgagtcattaagtgttaactcaaacccgctcgatggcca

SEQ ID NO: 192 - DNA, 696 bp, Pseudomonas putida KT2440; identical to SEQ ID NO: 175

SEQ ID NO: 193 - DNA, 642 bp, Pseudomonas putida KT2440; identical to SEQ ID NO: 176

SEQ ID NO: 194 - DNA, 55 bp, Artificial Sequence
  primer
gagcgggtttgagttcaattgtagctggtggaatatttgatcaataaaacgtacg

SEQ ID NO: 195 - DNA, 34 bp, Artificial Sequence
  primer
gagtcattaagtgtttcacttgatcagcggcacg

SEQ ID NO: 196 - DNA, 35 bp, Artificial Sequence
  primer
ctggtggaatatagtactatggcagaaagtaatgc

SEQ ID NO: 197 - DNA, 39 bp, Artificial Sequence
  primer
ttccaccagctaagtgctagcttaaggcgtggtcgtcag

SEQ ID NO: 198 - DNA, 35 bp, Artificial Sequence; identical to SEQ ID NO: 196
  primer

SEQ ID NO: 199 - DNA, 39 bp, Artificial Sequence; identical to SEQ ID NO: 197
  primer

SEQ ID NO: 200 - DNA, 35 bp, Artificial Sequence
  primer
ctggtggaatatagtactatggcagagaataattc

SEQ ID NO: 201 - DNA, 39 bp, Artificial Sequence
  primer
ttccaccagctaagtgctagcttagggcgctacagccag

SEQ ID NO: 202 - DNA, 35 bp, Artificial Sequence; identical to SEQ ID NO: 200
  primer

SEQ ID NO: 203 - DNA, 38 bp, Artificial Sequence
  primer
ttccaccagctaagtgctagcttagggcgcgacggcca

SEQ ID NO: 204 - DNA, 35 bp, Artificial Sequence; identical to SEQ ID NO: 196
  primer

SEQ ID NO: 205 - DNA, 40 bp, Artificial Sequence
  primer
ttccaccagctaagtgctagcttaaggcgtggtggtcagc

SEQ ID NO: 206 - DNA, 35 bp, Artificial Sequence; identical to SEQ ID NO: 200
  primer

SEQ ID NO: 207 - DNA, 40 bp, Artificial Sequence
  primer
ttccaccagctaagtgctagcttacggcgcgacggccagt

SEQ ID NO: 208 - DNA, 35 bp, Artificial Sequence
  primer
ctggtggaatatagtactatggcagagaataatac

SEQ ID NO: 209 - DNA, 40 bp, Artificial Sequence
  primer
ttccaccagctaagtgctagctcatggcgcgacggccagc

SEQ ID NO: 210 - DNA, 40 bp, Artificial Sequence
  primer
cggccagtgaattcgagctccgtaattgccctttaaaatt

SEQ ID NO: 211 - DNA, 41 bp, Artificial Sequence
  primer
gatccccgggtaccgcatgctatattccaccagctatttgt

SEQ ID NO: 212 - DNA, 34 bp, Artificial Sequence
  primer
gctggtggaatatagatgccgcgatatatcgatg

SEQ ID NO: 213 - DNA, 34 bp, Artificial Sequence
  primer
attacgccaagcttgtcagcgcccttggaagcgg

SEQ ID NO: 214 - DNA, 672 bp, Acinetobacter baylyi ADP1 dcaI
atgattaataaaatcattaatgatattgagcccattttaaaatcgattccagatggttcaacgattatgacaagtggttttggtacgacaggtcaacctgaggcactacttgaagcattaattgatttcgctccaaaagagttaactattatcaataataatgcttcatctggcccgaatggtttgactcagcttttcactgctggattggtcaaaaagctcatttgctcgtatccaaaatcaatcagttcgactgtttttccagatttatatcgtgcgggaaaaattgaacttgaactggttcctcagggaaatcttgcatgtcgtattcaagcagcaggtgctggtctgggagcggtatttacccccacaggctacgggaccaaaattgctgaaggcaaagaaacgcgcattattaacggtaaaaattatgtacttgaatatccacttgaagccgattatgcattcatttatgcagataaggcagatcgctgggggaatttaacttatcgtaaagccgccagaaattttggtccgattatggccaaagctgcaaaaacaacaattgctcaagtcaatcaaactgttgaattgggtgatcttgatcccgaatgcattattacacccgggatatttgtacagcatgtggtgcgattaggagatataaaatga

SEQ ID NO: 215 - DNA, 675 bp, Acinetobacter baylyi ADP1 dcaJ
atgacgattcagaaaagaagtcgagaagatatcgcaatcatgatagcaaaggatattcctgatggttcgtatgtcaatcttggaattggattaccaacccatgtcgcaaaatacttgccaaaagataaggaaatttttctgcactcagagaatggtgtactggcatttggtccacctcctgctgaaggtgaagaagatcaggacttagtcaatgcaggtaaagagctggtgactttactatcaggtggatgttttatgcatcatggagattcatttgacattatgcgtggtggacatctggatatttgcgttattggggcatttcaagtcgcgctcaatggtgatttggctaactggcatacaggtaaagacgatgatgtgcctgctgttgggggagcaatggatttggcggttggggccaagcgtatttttgtgtatatggaacataccaccaaaaaaggcgaacctaaaattgttaaacatctgacttatccaatcactggtgagcagtgtgttgatcgtatttatacagatttatgtacgattgagctgaaagatggacaggcatatgtgattgaaatggtcgacggattagattttgatactttgcaagccttaactgaatgcccattaattgatcactgtacttattcatcgttgattcagcttagataa

SEQ ID NO: 216 - DNA, 55 bp, Artificial Sequence
  primer
gagcgggtttgagttcaattgtagctggtggaatatatgattaataaaatcatta

SEQ ID NO: 217 - DNA, 34 bp, Artificial Sequence
  primer
gagtcattaagtgttttatctaagctgaatcaac

SEQ ID NO: 218 - DNA, 1155 bp, Acinetobacter baylyi ADP1 dcaA
atgattcgcgatgaagggatgttgcaacaattactttcgacaatacgagattttgtaaaaaatgaattgattcctcgagagcatgaagttgcagaaaaggattgtattcctgaagatattattcagcaaatgcgagaactaggcctatttggtttaaccattcccgaagaatacggtggacttggaatcacaatggaagaagaggtgaatgtcgcgtttgaacttggtcagacatccccagcatttcgttcattgattggcacaaataatggcattggttcaagtggtttaatcattgatggaactgaggagcaaaaacagaaatatttgccacgttatgccagtggagaaattattggttcattttgcttaactgaaccagaagcgggttcagatgctgcctctttaaaaacgacagcggtaaaagatggtgatttctacatattaaatggaaccaagcgttttattaccaatgcaccgcatgcagcaacatttaccgtaatggcacgcaccaatccagcaattaaaggggcaggtggaatttctgcttttttggtagaagccaatacaccaggtatcacactaggcaaaatagatcagaaaatgggacaaaaaggctctcatacctgtgatgtgatttttgaaaattgtcgagtacctgcatctgcattaattggtggcgttgaaggcgttggttttaaaacagcaatgaaagtgctggataaaggccgtctacatattggtgcatatagtgtaggtgttgcagagcgtatgttgaatgatgcactacattatgctgtcgagcgtaagcagtttggtcaacccattgcaaattttcaattgattcaagccatgctggcagactctaaagccgaaatttatgcggctaaatgtatggttttggatgcagcacgtcgccgtgatgaaggccaaaatattagtacagaagcctcatgtgccaagatgtttgcaacagaaatgtgtggtcgagtcgcagatcgctgtgtgcaaattcatggtggggcaggttacatcagtgaatattcgattgagcgtttttatcgtgacgtgcgtttattccgtctttatgagggtacgacccaagttcagcaaattattattgccaaaaatatgattaaggaagtgacgtcctaa

SEQ ID NO: 219 - DNA, 50 bp, Artificial Sequence
  primer
gggcgctgacaagcttagctggtggaatatatgattcgcgatgaagggat

SEQ ID NO: 220 - DNA, 36 bp, Artificial Sequence
  primer
tgattacgccaagcttttaggacgtcacttccttaa

SEQ ID NO: 221 - DNA, 70 bp, Artificial Sequence
  primer
gctggttttattcgtttctttatccatcacaacttgtagaaaaatccgtcgtgtaggctggagctgcttc

SEQ ID NO: 222 - DNA, 70 bp, Artificial Sequence
  primer
aaacgccgcaaagcggcgtttttgacaaaagaattatgtcacgttttataatgggaattagccatggtcc

SEQ ID NO: 223 - DNA, 20 bp, Artificial Sequence
  primer
cggtgccctgaatgaactgc

SEQ ID NO: 224 - DNA, 20 bp, Artificial Sequence
  primer
cgccggtgaaaccgtcacga

SEQ ID NO: 225 - DNA, 20 bp, Artificial Sequence
  primer
gtgctgcgtcgtctttagct

SEQ ID NO: 226 - DNA, 70 bp, Artificial Sequence
  primer
gacgttatcgcaacaccaataatttgcttcaccagtcaacggagtaatacgtgtaggctggagctgcttc

SEQ ID NO: 227 - DNA, 70 bp, Artificial Sequence
  primer
cagtcaggttcagtgtgtgctcatgacgtgacatggcgaagataggcaggatgggaattagccatggtcc

SEQ ID NO: 228 - DNA, 20 bp, Artificial Sequence
  primer
tggtggaaatggcgcagctt

SEQ ID NO: 229 - DNA, 20 bp, Artificial Sequence
  primer
gcgtaaccgacccaattcga

SEQ ID NO: 230 - DNA, 67 bp, Artificial Sequence
  primer
gaaagcaagtttctcccatccttctcaacttaaagactaagactgtcgtgtaggctggagctgcttc

SEQ ID NO: 231 - DNA, 70 bp, Artificial Sequence
  primer
cgcccatcagggcgcttcgatatacaaattaattcacaaaagcaatattaatgggaattagccatggtcc

SEQ ID NO: 232 - DNA, 18 bp, Artificial Sequence
  primer
ccggatgaactttcactt

SEQ ID NO: 233 - DNA, 18 bp, Artificial Sequence
  primer
gagctgcgtcatctttag

SEQ ID NO: 234 - DNA, 70 bp, Artificial Sequence
  primer
ggatttcatgttcaagcaacacctggttgtttcagtcaacggagtattacgtgtaggctggagctgcttc

SEQ ID NO: 235 - DNA, 70 bp, Artificial Sequence
  primer
tgaactgtaggccggatgtggcgttttcgccgcatccggcaacgtacttaatgggaattagccatggtcc

SEQ ID NO: 236 - DNA, 18 bp, Artificial Sequence
  primer
acgcatgagttgtatgaa

SEQ ID NO: 237 - DNA, 18 bp, Artificial Sequence
  primer
ttacccgatcaggatcat

SEQ ID NO: 238 - DNA, 1434 bp, Serratia grimesii NBRC13537
atgttcaagaacgcatttgcaaacctgcaaaaagtaggtaagtcgctaatgctgccggtgtccgtattgcctatcgcaggtatcctgctgggcgtcggttccgccaactttagctggctacctgcggtagtctcccacgtgatggcggaagccggcggttctgttttcgccaatatgccgttaattttcgccatcggtgttgccctgggcttcaccaacaacgacggtgtatccgcactggctgcagtcgtggcttacggcatcatggtgaaaaccatggcggtggttgcacctttggtgctgcacttgccggctgaagagattgcggccaaacatttggcggataccggtgtgctcggggggattatctccggctccatcgctgcctatatgttcaaccgcttcttccgcattcaattgccggaatacctgggcttctttgcaggtaagcgttttgtgccgattatctccggcctggcggcgatcgttctgggcgtagtattgtccttcatctggcctccaatcggtacggctatccagaccttctcccagtgggctgcttatcagaacccggtagtggcgtttggtatttacggcgtggttgaacgtgcgctggtgccatttggtctgcaccatatctggaacgtaccgttccaaatgcagattggtgagtacaccaacgcagcaggtcaggtattccacggcgatatcccacgttatatggcgggtgacccaactgcgggtaaactgtccggtggcttcctgttcaaaatgtacggtctgcctgctgctgcgattgccatctggcactcagccaagccggaaaaccgcgctaaagtcggcggtatcatgatctccgctgccttgacctcgttcctgaccggtatcaccgaaccgatcgagttctcattcatgttcgtcgcgccgatcctgtacgcaatccatgccatcctggctggcctggcgttcccgatctgtatcctgctgggtatgcgtgacggcaccagcttctcacacggtttgatcgactttatcgtactgagcggtaacagcagcaaaatttggctgttcccaatcgtcggtatcatctacggtctggtgtactacaccatcttccgtgtgctgattgccaagctggatctgaaaaccccaggtcgcgaagacactgtttctgagcaggttgcacagggcggttctgaaatgtctgcggcgctggttcaggctttcggcggtaaagaaaacatcaccaacctggatgcctgtatcacccgtctgcgtgttagcgtggcggacgtgagcaaggttgaccaggctggcctgaaaaaactgggtgctgccggcgtagttgtcgcaggctctggtgttcaggctatctttggtaccaaatctgataacctgaaaacggatatggacgaatacatccgtaaccattaa

SEQ ID NO: 239 - DNA, 70 bp, Artificial Sequence
  primer
aagaatcgcggaaagtagcaaagcactattactcaggagcacactcaactgtgtaggctggagctgcttc

SEQ ID NO: 240 - DNA, 70 bp, Artificial Sequence
  primer
gccaataaaaaagggaggctttcgcctcccttaaaactcccctgcctgaaatgggaattagccatggtcc

SEQ ID NO: 241 - DNA, 20 bp, Artificial Sequence
  primer
gtaccgcttgatcgcattct

SEQ ID NO: 242 - DNA, 19 bp, Artificial Sequence
  primer
gaatatggttacaagcgca

SEQ ID NO: 243 - DNA, 70 bp, Artificial Sequence
  primer
cacgcgtgagaacgtaaaaaaagcacccatactcaggagcactctcaattgtgtaggctggagctgcttc

SEQ ID NO: 244 - DNA, 70 bp, Artificial Sequence
  primer
agccatctggctgccttagtctccccaacgtcttacggattagtggttacatgggaattagccatggtcc

SEQ ID NO: 245 - DNA, 20 bp, Artificial Sequence
  primer
atcggttactggtggaaact

SEQ ID NO: 246 - DNA, 20 bp, Artificial Sequence
  primer
gtggatgggacagtcagtaa

1. A genetically modified microorganism in which a nucleic acid encoding any one of the polypeptides described in (a) to (c) below is introduced or the expression of the polypeptide is enhanced and the function of pyruvate kinase is impaired:
(a) a polypeptide composed of an amino acid sequence represented by any one of SEQ ID NOs: 1 to 7;
(b) a polypeptide composed of the same amino acid sequence as that represented by any one of SEQ ID NOs: 1 to 7, except that one or several amino acids are substituted, deleted, inserted, andlor added, and having an enzymatic activity that catalyzes a reaction to reduce 3-oxoadipyl-CoA to 3-hydroxyadipyl-CoA;
(c) a polypeptide composed of an amino acid sequence with a sequence identity of not less than 70% to the sequence represented by any one of SEQ ID NOs: 1 to 7 and having an enzymatic activity that catalyzes a reaction to reduce 3-oxoadipyl-CoA to 3-hydroxyadipyl-CoA.

2. The genetically modified microorganism according to claim 1, wherein a polypeptide selected from the above (b) and (c) contains a region composed of an amino acid sequence represented by SEQ ID NO: 173.

3. The genetically modified microorganism according to claim 2, wherein the amino acid sequence represented by SEQ ID NO: 173 contains a phenylalanine or leucine residue at the 13th amino acid position from the N terminus, a leucine or glutamine residue at the 15th amino acid position from the N terminus, a lysine or asparagine residue at the 16th amino acid position from the N terminus, a glycine or serine residue at the 17th amino acid position from the N terminus, a proline or arginine residue at the 19th amino acid position from the N terminus, and a leucine, methionine, or valine residue at the 21st amino acid position from the N terminus.

4. The genetically modified microorganism according to any one of claim 1, which is a genetically modified microorganism belonging to a genus selected from the group consisting of Escherichia, Serratia, Hafnia, and Pseudomonas.

5. The genetically modified microorganism according to claim 1, which has an ability to generate 3-oxoadipyl-CoA and coenzyme A from acetyl-CoA and succinyl-CoA and an ability to generate 3-hydroxyadipic acid from 3-hydroxyadipyl-CoA.

6. The genetically modified microorganism according to claim 1, which has an ability to generate 3-oxoadipyl-CoA and coenzyme A from acetyl-CoA and succinyl-CoA, an ability to generate 2,3-dehydroadipyl-CoA from 3-hydroxyadipyl-CoA, and an ability to generate α-hydromuconic acid from 2,3-dehydroadipyl-CoA.

7. The genetically modified microorganism according to claim 1, which has an ability to generate 3-oxoadipyl-CoA and coenzyme A from acetyl-CoA and succinyl-CoA, an ability to uenerate 2,3-dehydroadipyl-CoA from 3-hydroxyadipyl-CoA, an ability to generate adipyl-CoA from 2,3-dehydroadipyl-CoA, and an ability to generate adipic acid from adipyl-CoA.

8. The genetically modified microorganism according to claim 1, wherein the function of a phosphotransferase system enzyme is further impaired.

9. A method of producing 3-hydroxyadipic acid, comprising culturing the uenetically modified microorganism according to claim 1 in a culture medium containing a carbon source as a raw material for fermentation.

10. A method of producing α-hydromuconic acid, comprising culturing the genetically modified microorganism according to claim 1 in a culture medium containing a carbon source as a raw material for fermentation.

11. A method of producing adipic acid, comprising culturing the genetically modified microorganism according to claim 1 in a culture medium containing a carbon source as a raw material for fermentation.

12. A method of producing one or more substances selected from the group consisting of 3-hydroxyadipic acid, α-hydromuconic acid, and adipic acid, comprising culturing a uenetically modified microorganism in a culture medium containing a carbon source as a raw material for fermentation, Wherein a nucleic acid encoding a polypeptide encoded by the 3-hydroxybutyryl-CoA dehydrogenase gene of a microorganism of the genus Serratia , which forms a gene cluster with 5-aminolevulinic acid synthase gene in the microorganism, is introduced or the expression of the polypeptide is enhanced and the function of pyruvate kinase is impaired in the genetically modified microorganism.

13. The method according to claim 12, wherein the genetically modified microorganism is a microorganism in which the function of a phosphotransferase system enzyme is further impaired.
